(19) United States
(12) Patent Application Publication
(10) Pub. No.: US 2022/0389398 A1
(43) Pub. Date: Dec. 8, 2022

(54) ENGINEERED CRISPR/CAS13 SYSTEM AND USES THEREOF

(71) Applicant: HuiGene Therapeutics Co., Ltd., Shanghai (CN)

(72) Inventors: Huawei Tong, Shanghai (CN); Xing Wang, Shanghai (CN); Shaoran Wang, Shanghai (CN)

(21) Appl. No.: 17/836,175

(22) Filed: Jun. 9, 2022

Related U.S. Application Data
(63) Continuation of application No. PCT/CN2021/121926, filed on Sep. 29, 2021.

(30) Foreign Application Priority Data
Sep. 30, 2020 (CN) PCT/CN2020/119559
Mar. 9, 2021 (CN) PCT/CN2021/079821

(51) Int. Cl. C12N 9/22; C12N 15/11; C12N 15/10; C12N 15/90

(52) U.S. Cl. CPC C12N 9/22; C12N 15/11; C12N 15/102; C12N 15/907; C12N 2310/20; C12N 2800/80; A61K 48/00

(57) ABSTRACT

The invention provides novel engineered CRISPR/Cas effector enzymes, such as Cas13 (e.g., Cas13d, Cas13e, or Cas13f) that substantially maintain guide-sequence-specific endonuclease activity and substantially lack guide-sequence-independent collateral endonuclease activity compared to the corresponding wild-type Cas. Also provided are polynucleotides encoding the same, vectors or host cells comprising the polynucleotides or engineered Cas, and method of use, such as in RNA-based target gene transcript knock down.

### REFERENCE TO RELATED APPLICATIONS

[0001] The instant application is a continuation application, filed under 35 U.S.C. 111(a), of International Patent Application No. PCT/CN2021/121926, filed on Sep. 29, 2021, which claims foreign priority under 35 U.S.C. 365(b), to International Patent Application No. PCT/CN2021/079821, filed on Mar. 9, 2021, and International Patent Application No. PCT/CN2020/119559, filed on Sep. 30, 2020, the entire contents of each of the above-referenced applications, including any sequence listing and drawings, are incorporated herein by reference.

### SEQUENCE LISTING

[0002] The instant application contains a Sequence Listing which has been submitted electronically in ASCII format and is hereby incorporated by reference in its entirety. Said ASCII copy, created on Jun. 9, 2022, is named 132045-00401_SL.txt and is 903,580 bytes in size.

### BACKGROUND OF THE INVENTION

[0003] CRISPR (clustered regularly interspaced short palindromic repeats) is a family of DNA sequences found within the genomes of prokaryotic organisms such as bacteria and archaea. These sequences are understood to be derived from DNA fragments of bacteriophages that have previously infected the prokaryote, and are used to detect and destroy DNA or RNA from similar bacteriophages during subsequent infections of the prokaryotes.

[0004] CRISPR-associated system is a set of homologous genes, or Cas genes, some of which encode Cas protein having helicase and nuclease activities. The Cas proteins are enzymes that utilize RNA derived from the CRISPR sequences (crRNA) as guide sequences to recognize and cleave specific strands of polynucleotide (e.g., DNA) that are complementary to the crRNA.

[0005] Together, the CRISPR-Cas system constitutes a primitive prokaryotic “immune system” that confers resistance or acquired immunity to foreign pathogenic genetic elements, such as those present within extrachromosomal DNA (e.g., plasmids) and bacteriophages, or foreign RNA encoded by foreign DNA.

[0006] In nature, the CRISPR/Cas system appears to be a widespread prokaryotic defense mechanism against foreign genetic materials, and is found in approximately 50% of sequenced bacterial genomes and nearly 90% of sequenced archaea. This prokaryotic system has since been developed to form the basis of a technology known as CRISPR-Cas that found extensive use in numerous eukaryotic organisms including human, in a wide variety of applications including basic biological research, development of biotechnology products, and disease treatment.

[0007] The prokaryotic CRISPR-Cas systems comprise an extremely diverse group of effector proteins, non-coding elements, as well as loci architectures, some examples of which have been engineered and adapted to produce important biotechnologies.

[0008] The CRISPR locus structure has been studied in many systems. In these systems, the CRISPR array in the genomic DNA typically comprises an AT-rich leader sequence, followed by short DR sequences separated by unique spacer sequences. These CRISPR DR sequences typically range in size from 28 to 37 bps, though the range can be 23-55 bps. Some DR sequences show dyad symmetry, implying the formation of a secondary structure such as a stem-loop (“hairpin”) in the RNA, while others appear unstructured. The size of spacers in different CRISPR arrays is typically 28-38 bps (with a range of 21-72 bps). There are usually fewer than 50 units of the repeat-spacer sequence in a CRISPR array.

[0009] Small clusters of cas genes are often found next to such CRISPR repeat-spacer arrays. So far, the 93 identified cas genes have been grouped into 35 families, based on sequence similarity of their encoded proteins. Eleven of the 35 families form the so-called cas core, which includes the protein families Cas1 through Cas9. A complete CRISPR-Cas locus has at least one gene belonging to the cas core.

[0010] CRISPR-Cas systems can be broadly divided into two classes—Class 1 systems use a complex of multiple Cas proteins to degrade foreign nucleic acids, while Class 2 systems use a single large Cas protein for the same purpose. The single-subunit effector compositions of the Class 2 systems provide a simpler component set for engineering and application translation, and has thus far been important sources of discovery, engineering, and optimization of novel powerful programmable technologies for genome engineering and beyond.

[0011] Class 1 system is further divided into types I, III, and IV; and Class 2 system is divided into types II, V, and VI. These 6 system types are additionally divided into 19 subtypes. Classification is also based on the complement of cas genes that are present. Most CRISPR-Cas systems have a Cas1 protein. Many prokaryotes contain multiple CRISPR-Cas systems, suggesting that they are compatible and may share components.

[0012] One of the first and best characterized Cas proteins—Cas9—is a prototypical member of Class 2, type II, and originates from Streptococcus pyogenes (SpCas9). Cas9 is a DNA endonuclease activated by a small crRNA molecule that complements a target DNA sequence, and a separate trans-activating CRISPR RNA (tracrRNA). The crRNA consists of a direct repeat (DR) sequence responsible for protein binding to the crRNA and a spacer sequence, which may be engineered to be complementary to any desired nucleic acid target sequence. In this way, CRISPR systems can be programmed to target DNA or RNA targets by modifying the spacer sequence of the crRNA. The crRNA and tracrRNA have been fused to form a single guide RNA (sgRNA) for better practical utility. When combined with Cas9, sgRNA hybridizes with its target DNA, and guides Cas9 to cut the target DNA. Other Cas9 effector protein from other species have also been identified and used similarly, including Cas9 from the S. thermophilus CRISPR system. These CRISPR/Cas9 systems have been widely used in numerous eukaryotic organisms, including baker's yeast (Saccharomyces cerevisiae), the opportunistic pathogen Candida albicans, zebrafish (Danio rerio), fruit flies (Drosophila melanogaster), ants (Harpegnathos saltator and Ooceraea biroi), mosquitoes (Aedes aegypti), nematodes (Caenorhabditis elegans), plants, mice, monkeys, and human embryos.

[0013] Another recently characterized Cas effector protein is Cas12a (formerly known as Cpf1). Cas12a, together with C2c1 and C2c3, are members belonging to Class 2, type V Cas proteins that lack HNH nuclease, but have RuvC nuclease activity. Cas12a which was initially characterized in the CRISPR/Cpf1 system of the bacterium Francisella novicida. Its original name reflects the prevalence of its CRISPR-Cas subtype in the Prevotella and Francisella lineages. Cas12a showed several key differences from Cas9, including: causing a “staggered” cut in double stranded DNA as opposed to the “blunt” cut produced by Cas9, relying on a “T rich” PAM sequence (which provides alternative targeting sites to Cas9) and requiring only a CRISPR RNA (crRNA) and no tracrRNA for successful targeting. Cas12a's small crRNAs are better suited than Cas9 for multiplexed genome editing, as more of them can be packaged in one vector than can Cas9's sgRNAs. Further, the sticky 5′ overhangs left by Cas12a can be used for DNA assembly that is much more target-specific than traditional Restriction Enzyme cloning. Finally, Cas12a cleaves DNA 18-23 base pairs downstream from its PAM site, which means no disruption to the nuclease recognition sequence after DNA repair following the creation of double stranded break (DSB) by the NHEJ system, thus Cas12a enables multiple rounds of DNA cleavage, as opposed to the likely one round after Cas9 cleavage because the Cas9 cleavage sequence is only 3 base pairs upstream of the PAM site, and the NHEJ pathway typically results in indel mutations which destroy the recognition sequence, thereby preventing further rounds of cutting. In theory, repeated rounds of DNA cleavage is associated with an increased chance for the desired genomic editing to occur.

[0014] More recently, several Class 2, type VI Cas proteins, including Cas13 (also known as C2c2), Cas13b, Cas13c, Cas13d (including the engineered variant CasRx), Cas13e, and Cas13f have been identified, each is an RNA-guided RNase (i.e., these Cas proteins use their crRNA to recognize target RNA sequences, rather than target DNA sequences in Cas9 and Cas12a). Overall, the CRISPR/Cas13 systems can achieve higher RNA digestion efficiency compared to the traditional RNAi and CRISPRi technologies, while simultaneously exhibiting much less off-target cleavage compared to RNAi.

[0015] CRISPR-Cas13 is quickly becoming a widely adopted RNA editing technology. This system can use its sequence specific guide RNA to selectively modify (e.g., cut or cleave via endonuclease activity) a target RNA, such as mRNA. Compared to the permanent genomic changes introduced by DNA-based editing, RNA controls gene expression at the transcription level, thus providing a safer and more controllable gene therapy approach. Because of the high RNA editing efficiency of the CRISPR/Cas13 systems, they have already been widely used in a number of organisms including yeast, plant, mammal, and zebra fish (see (Abudayyeh et al., 2017; Aman et al., 2018; Cox et al., 2017; Jing et al., 2018; Konermann et al., 2018). An ortholog of CRISPR-Cas13d, CasRx, could mediate RNA knockdown in vivo and effectively alleviate disease phenotypes in various mouse models (He et al., Protein Cell 11:518-524, 2020; Zhou et al., Cell 181:590-603 e516, 2020; and Zhou et al., National Science Review 7:835-837, 2020).

[0016] One drawback from these currently identified Cas13 proteins, however, is that they all have non-specific/collateral RNase activity upon activation by crRNA-based target sequence recognition. This activity is particularly strong in Cas13a and Cas13b, and still detectably exists in Cas13d and, to a lesser extent, in Cas13e, for example. While this property can be advantageously used in nucleic acid detection methods, the non-specific/collateral RNase activity of these Cas13 proteins also causes undesirable collateral degradation of bystander RNAs, and has imposed a major barrier for their in vivo application, such as in gene therapy.

[0017] On the other hand, for practical utilities such as SHERLOCK that relies on collateral activity for sensitive detection, it can be beneficial to have mutant Cas13 effector enzymes that exhibit even higher collateral activity compared to wild-type Cas13.

[0018] Thus, there is a need to further optimize wild-type Cas13 in the art for different purposes, e.g., either to lower collateral cleavage activity with acceptable on-target cleavage activity for certain uses such as therapeutical applications, or to enhance/increase collateral cleavage activity with acceptable on-target cleavage activity for certain other uses such as diagnostic applications.

### SUMMARY OF THE INVENTION

[0019] One aspect of the invention provides an engineered Clustered Regularly Interspaced Short Palindromic Repeat (CRISPR)-Cas13 effector enzyme, wherein the engineered Cas13: (1) comprises a mutation in a region spatially close to an endonuclease catalytic domain (e.g., a HEPN domain) of the corresponding wild-type Cas13 effector enzyme; (2) substantially preserves (e.g., retains at least 50%, 60%, 70%, 72.5%, 75%, 80%, 85%, 87.5%, 90%, 95%, 96%, 97%, 97.5%, 98%, 99% or more of) guide sequence-specific endonuclease cleavage activity of the wild-type Cas13 (or theoretical maximum thereof) towards a target RNA complementary to the guide sequence; and, (3) substantially lacks (e.g., retains less than 50%, 40%, 35%, 30%, 27.5%, 25%, 22.5%, 20%, 17.5%, 15%, 12.5%, 10%, 7.5%, 5%, 4%, 3%, 2.5%, 2%, 1% or less of) guide sequence-independent collateral endonuclease cleavage activity of the wild-type Cas13 (or theoretical maximum thereof) towards a non-target RNA that does not bind to the guide sequence.

[0020] Another aspect of the invention provides an engineered Clustered Regularly Interspaced Short Palindromic Repeat (CRISPR)-Cas13 effector enzyme, wherein the engineered Cas13: (1) comprises a mutation in a region spatially close to an endonuclease catalytic domain (e.g., a HEPN domain) of the corresponding wild-type Cas13 effector enzyme; (2) substantially preserves or has enhanced (e.g., retains at least 50%, 60%, 70%, 72.5%, 75%, 80%, 85%, 87.5%, 90%, 95%, 96%, 97%, 97.5%, 98%, 99%, 100%, 102%, 105%, 108%, 110% or more of) guide sequence-specific endonuclease cleavage activity of the wild-type Cas13 (or theoretical maximum thereof) towards a target RNA complementary to the guide sequence; and, (3) substantially enhances (e.g., has more than 100%, 110%, 120%, 130%, 140%, 150%, 160%, 170%, 180%, 190%, 200% or more of) guide sequence-independent collateral endonuclease cleavage activity of the wild-type Cas13 towards a non-target RNA that does not bind to the guide sequence.

[0021] In certain embodiments, the Cas13 is a Cas13a, a Cas13b, a Cas13c, a Cas13d (including CasRx), a Cas13e, or a Cas13f.

[0022] In certain embodiments, the Cas13e has the amino acid sequence of SEQ ID NO: 4, and/or wherein the Cas13d has the amino acid sequence of SEQ ID NO: 101, and/or wherein the Cas13f has the amino acid sequence of SEQ ID NO: 52.

[0023] In certain embodiments, the region includes residues within 130, 125, 120, 110, 100, 90, 80, 70, 60, 50, 40, 30, 20, or 10 amino acids from any residues of the endonuclease catalytic domain (e.g., an RXXXXH domain) in the primary sequence of the Cas13e, and residues within 170, 160, 150, 140, 130, 120, 110, 100, 90, 80, 70, 60, 50,40, 30, 20, or 10 amino acids from any residues of the endonuclease catalytic domain (e.g., an RXXXXH domain) in the primary sequence of the Cas13d; or residues within 140, 130, 120, 110, 100, 90, 80, 70, 60, 50, 40, 30, 20, or 10 amino acids from any residues of the endonuclease catalytic domain (e.g., an RXXXXH domain) in the primary sequence of the Cas13f.

[0024] In certain embodiments, the region includes residues more than 100, 110, 120, or 130 residues away from any residues of the endonuclease catalytic domain in the primary sequence of the Cas13, but are spatially within 1-10 or 5 angstrom of a residue of the endonuclease catalytic domain.

[0025] In certain embodiments, the endonuclease catalytic domain is a HEPN domain, optionally a HEPN domain comprising an RXXXXH motif.

[0026] In certain embodiments, the RXXXXH motif comprises a R{N/H/K/Q/R}X₁X₂X₃H sequence (SEQ ID NO: 1024).

[0027] In certain embodiments, in the R{N/H/K/Q/R}X₁X₂X₃H sequence (SEQ ID NO: 1025), X₁ is R, S, D, E, Q, N, G, or Y; X₂ is I, S, T, V, or L; and X₃ is L, F, N, Y, V, I, S, D, E, or A.

[0028] In certain embodiments, the RXXXXH motif is an N-terminal RXXXXH motif comprising an RNXXXH sequence, such as an RN{Y/F}{F/Y}SH sequence (SEQ ID NO: 64).

[0029] In certain embodiments, the N-terminal RXXXXH motif has a RNYFSH sequence (SEQ ID NO: 65).

[0030] In certain embodiments, the N-terminal RXXXXH motif has a RNFYSH sequence (SEQ ID NO: 66).

[0031] In certain embodiments, the RXXXXH motif is a C-terminal RXXXXH motif comprising an R{N/A/R}{A/K/S/F}{A/L/F}{F/H/L}H sequence (SEQ ID NO: 1026).

[0032] In certain embodiments, the C-terminal RXXXXH motif has a RN(A/K)ALH sequence (SEQ ID NO: 67).

[0033] In certain embodiments, the C-terminal RXXXXH motif has a RAFFHH (SEQ ID NO: 68) or RRAFFH sequence (SEQ ID NO: 69).

[0034] In certain embodiments, said region comprises, consists essentially of, or consists of: (i) residues corresponding to residues between residues 1-194, 2-187, 227-242, 620-775, or 634-755 of SEQ ID NO: 4; or, (ii) residues corresponding to the HEPN1-1 domain (e.g., residues 90-292), Helical2 domain (e.g., residues 536-690), and the HEPN2 domain (e.g., residues 690-967) of SEQ ID NO: 101; or, (iii) residues corresponding to the HEPN1 domain (e.g., residues 1-168), Helical1 domain, Helical2 domain (e.g., residues 346-477), and the HEPN2 domain (e.g., residues 644-790) of SEQ ID NO: 52.

[0035] In certain embodiments, said region comprises, consists essentially of, or consists of residues corresponding to residues between residues 35-51, 52-67, 156-171, 666-682, or 712-727 of SEQ ID NO: 4.

[0036] In certain embodiments, said mutation comprises, consists essentially of, or consists of substitutions, within a stretch of 15-20 consecutive amino acids within the region, (a) one or more charged, nitrogen-containing side chain group, bulky (such as F or Y), aliphatic, and/or polar residues to a charge-neutral short chain aliphatic residue (such as A, V, or I); (b) one or more I/L to A substitution(s); and/or (c) one or more A to V substitution(s).

[0037] In certain embodiments, said stretch is about 16 or 17 residues.

[0038] In certain embodiments, substantially all, except for up to 1, 2, or 3, charged and polar residues within the stretch are substituted.

[0039] In certain embodiments, a total of about 7, 8, 9, or 10 charged and polar residues within the stretch are substituted.

[0040] In certain embodiments, the N- and C-terminal 2 residues of the stretch are substituted to amino acids the coding sequences of which contain a restriction enzyme recognition sequence.

[0041] In certain embodiments, the N-terminal two residues are VF, and the C-terminal 2 residues are ED, and the restriction enzyme is BpiI.

[0042] In certain embodiments, the one or more charged or polar residues comprise N, Q, R, K, H, D, E, Y, S, and T residues.

[0043] In certain embodiments, the one or more charged or polar residues comprise R, K, H, N, Y, and/or Q residues.

[0044] In certain embodiments, one or more Y residue(s) within said stretch is substituted.

[0045] In certain embodiments, said one or more Y residues(s) correspond to Y672, Y676, and/or Y715 of wild-type Cas13e.1 (SEQ ID NO: 4).

[0046] In certain embodiments, said stretch is residues 35-51, 52-67, 156-171, 666-682, or 712-727 of SEQ ID NO: 4.

[0047] In certain embodiments, the mutation comprises Ala substitution(s) corresponding to any one or more of SEQ ID NOs: 37-39, 45, and 48.

[0048] In certain embodiments, the charge-neutral short chain aliphatic residue is Ala (A).

[0049] In certain embodiments, said mutation with reduced collateral activity comprises, consists essentially of, or consists of: (a) substitutions within 1, 2, 3, 4, or 5 of said stretches of 15-20 consecutive amino acids within the region; (b) a mutation corresponds to a Cas13d mutation of Example 4 that retains at least about 75% of guide RNA-specific cleavage of wild-type Cas13d (such as SEQ ID NO: 101) (or theoretical maximum thereof), and exhibits less than about 27.5% collateral effect of wild-type Cas13d (such as SEQ ID NO: 101) (or theoretical maximum thereof); (c) a mutation corresponds to the N1V7, N2V7, N2V8 (cfCas13d), N3V7, or N15V4 mutation of Cas13d mutation; (d) a mutation corresponds to a Cas13d mutation of Example 4 that retains between about 25-75% of guide RNA-specific cleavage of wild-type Cas13d (such as SEQ ID NO: 101) (or theoretical maximum thereof), and exhibits less than about 27.5% collateral effect of wild-type Cas13d (such as SEQ ID NO: 101) (or theoretical maximum thereof); (e) a mutation corresponds to the N2V4, N2V5, N4V3, N6V3, N10V6, N15V2, N20V6, or N20-Y910A mutation of Cas13d mutation; (f) a mutation corresponds to a Cas13e mutation of Example 1, 2, or 5 that retains at least about 75% of guide RNA-specific cleavage of wild-type Cas13e (such as SEQ ID NO: 4) (or theoretical maximum thereof), and exhibits less than about 25% collateral effect of wild-type Cas13e (such as SEQ ID NO: 4) (or theoretical maximum thereof); (g) a mutation corresponds to the M1V4, M2V2, M2V3, M2V4, M5V1, M6V2, M6V3, M6V4, M7V1, M7V2, M7V3, M7-Y55A, M7-Y61A, M11V1, M12V3, M15V1, M15V2, M15-Y643A, M15-Y647A, M16V1, M16V2, M17V2, M18V2, M18V3, M19V2, M19V3, or M19-IA mutation of Cas13e mutation; (h) a mutation corresponds to a Cas13e mutation of Example 5 that retains between about 25-75% of guide RNA-specific cleavage of wild-type Cas13e (such as SEQ ID NO: 4) (or theoretical maximum thereof), and exhibits less than about 25% collateral effect of wild-type Cas13e (such as SEQ ID NO: 4) (or theoretical maximum thereof); (i) a mutation corresponds to the M17YY (cfCas13e), M8V4, M9V1, M11V2, M11V3, M13V1, M13V2, M13V3, M15V3, or M20V2 mutation of Cas13e mutation; (j) a mutation corresponds to a Cas13f mutation (e.g., that of Example 12) that retains at least about 75% of guide RNA-specific cleavage of wild-type Cas13f (such as SEQ ID NO: 52) (or theoretical maximum thereof), and exhibits less than about 25 or 27.5% collateral effect of wild-type Cas13f (such as SEQ ID NO: 52) (or theoretical maximum thereof); (k) a mutation corresponds to the F7V2, F10V1, F10V4, F40V2, F40V4, F44V2, F10S19, F10S21, F10S24, F10S26, F10S27, F10S33, F10S34, F10S35, F10S36, F10S45, F10S46, F10S48, F10S49, F40S22, F40S23, F40S26, F40S27, OR F40S36 mutation of Cas13f mutation; (1) a mutation corresponds to a Cas13f mutation (e.g., that of Example 12) that retains between about 50-75% of guide RNA-specific cleavage of wild-type Cas13f (such as SEQ ID NO: 52) (or theoretical maximum thereof), and exhibits less than about 25 or 27.5% collateral effect of wild-type Cas13f (such as SEQ ID NO: 52) (or theoretical maximum thereof); and/or (m) a mutation corresponds to the F2V4, F3V1, F3V3, F3V4, F5V2, F5V3, F6V4, F7V1, F38V4, F40V1, F41V1, F41V3, F42V4, F43V1, F10S2, F10S11, F10S12, F10S18, F10S20, F10S23, F10S25, F10S28, F10S43, F10S44, F10S47, F10S50, F10S51, F10S52, F40S7, F40S9, F40S11, F40S21, F40S22, F40S24, F40S28, F40S29, F40S30, F40S35, OR F40S37 mutation of Cas13f mutation.

[0050] In certain embodiments, the mutation with enhanced collateral activity comprises, consists essentially of, or consists of: (a) substitutions within 1, 2, 3, 4, or 5 of said stretches of 15-20 consecutive amino acids within the region; (b) a mutation corresponds to a Cas13d mutation (e.g., that of Example 4) that retains at least about 75% of guide RNA-specific cleavage of wild-type Cas13d (such as SEQ ID NO: 101) (or theoretical maximum thereof), and exhibits more than about 110%, 115%, 120%, 125%, 130%, 135%, 140%, 145%, 150%, 155%, 160%, 165%, 170%, 175%, 180% or more collateral effect of wild-type Cas13d (such as SEQ ID NO: 101); (c) a mutation corresponds to the N2-Y142A, N4-Y193A, N12-Y604A, N21V7 mutation of Cas13d mutation in Example 4; (d) a mutation corresponds to a Cas13e mutation (e.g., that of Example 5) that retains at least about 75% of guide RNA-specific cleavage of wild-type Cas13e (such as SEQ ID NO: 4) (or theoretical maximum thereof), and exhibits more than about 110%, 115%, 120%, 125%, 130%, 135%, 140%, 145%, 150%, 155%, 160%, 165%, 170%, 175%, 180% or more collateral effect of wild-type Cas13e (such as SEQ ID NO: 4); (e) a mutation corresponds to the M4V2, M4V3, M4V4, M8V1, M8V2, M9V2, M9V3, M10V1, M10V2, M11V4, M12V2, M14V1, M14V2, M16V3, M18V1, M19-G712A, M19-C727A, M19T725A, or M21V2 mutation of Cas13e mutation; (f) a mutation corresponds to a Cas13f mutation (e.g., that of Example 12) that retains at least about 75% of guide RNA-specific cleavage of wild-type Cas13f (such as SEQ ID NO: 52) (or theoretical maximum thereof), and exhibits more than about 110%, 115%, 120%, 125%, 130%, 135%, 140%, 145%, 150%, 155%, 160%, 165%, 170%, 175%, 180% or more collateral effect of wild-type Cas13f (such as SEQ ID NO: 52); (g) a mutation corresponds to the F38V2, F42V1, F46V3, F38S2, F38S4, F38S5, F38S6, F38S7, F38S8, F38S9, F38S10, F38S11, F38S12, F38S13, F38S15, F38S16, F38S17, F40S1, F40S2, F40S3, F40S4, F40S5, F40S6, F40S8, F40S16, F40S18, F46S1, F46S4, F46S6, F46S7, F46S10, F46S14, F46S15, F10S4, F10S5, F10S6, F10S9, F10S10, F10S7, F38S1, F38S13, or F46S2 mutation of Cas13f mutation (e.g., that of Example 12).

[0051] In certain embodiments, the engineered Cas13 preserves at least about 50%, 60%, 70%, 80%, 85%, 90%, 95%, 96%, 97%, 98%, or 99% of the guide sequence-specific endonuclease cleavage activity of the wild-type Cas13 (or theoretical maximum thereof) towards the target RNA.

[0052] In certain embodiments, the engineered Cas13 lacks at least about 70%, 72.5%, 75%, 77.5%, 80%, 82.5%, 85%, 87.5%, 90%, 92.5%, 95%, 96%, 97%, 98%, 99%, or 100% of the guide sequence-independent collateral endonuclease cleavage activity of the wild-type Cas13 (or theoretical maximum thereof) towards the non-target RNA.

[0053] In certain embodiments, the engineered Cas13 preserves at least about 80-90% of the guide sequence-specific endonuclease cleavage activity of the wild-type Cas13 (or theoretical maximum thereof) towards the target RNA, and lacks at least about 95-100% of the guide sequence-independent collateral endonuclease cleavage activity of the wild-type Cas13 (or theoretical maximum thereof) towards the non-target RNA.

[0054] In certain embodiments, the engineered Cas13 of the invention has an amino acid sequence at least 80%, 85%, 90%, 95%, 96%, 97%, 98%, 99%, 99.1%, 99.2%, 99.3%, 99.4%, 99.5%, 99.6%, 99.7%, 99.8%, or 99.86% identical to any one of SEQ ID NOs: 6-10 and Cas13d (e.g., SEQ ID NO: 101), excluding any one or more of the regions defined by SEQ ID NOs: 16, 20, 24, 28, and 32, and any of the mutation regions in Example 4 or 5.

[0055] In certain embodiments, said amino acid sequence contains up to 1, 2, 3, 4, or 5 differences (a) in each of one or more regions defined by SEQ ID NO: 16, 20, 24, 28, and 32, as compared to SEQ ID NOs: 17, 21, 25, 29, and 33, respectively, or (b) in any of the desired mutations in Cas13d and Cas13e disclosed herein.

[0056] In certain embodiments, the engineered Cas13 of the invention has the amino acid sequence of any one of SEQ ID NOs: 6-10.

[0057] In certain embodiments, the engineered Cas13 of the invention has the amino acid sequence of SEQ ID NO: 9 or 10.

[0058] In certain embodiments, the engineered Cas13 of the invention further comprises a nuclear localization signal (NLS) sequence or a nuclear export signal (NES).

[0059] In certain embodiments, the engineered Cas13 comprises an N- and/or a C-terminal NLS.

[0060] Another aspect of the invention provides a polynucleotide encoding the engineered Cas13 of the invention.

[0061] In certain embodiments, the polynucleotide of the invention is codon-optimized for expression in a eukaryote, a mammal, such as a human or a non-human mammal, a plant, an insect, a bird, a reptile, a rodent (e.g., mouse, rat), a fish, a worm/nematode, or a yeast.

[0062] Another aspect of the invention provides A polynucleotide having (i) one or more (e.g., 1, 2, 3, 4, 5, 6, 7, 8, 9 or 10) nucleotides additions, deletions, or substitutions compared to the polynucleotide of the invention; (ii) at least 50%, 60%, 70%, 80%, 90%, 95%, or 97% sequence identity to the polynucleotide of the invention; (iii) hybridize under stringent conditions with the polynucleotide of the invention, or any of (i) and (ii); or (iv) is a complement of any of (i)-(iii).

[0063] Another aspect of the invention provides a vector comprising the polynucleotide of the invention.

[0064] In certain embodiments, the polynucleotide is operably linked to a promoter and optionally an enhancer.

[0065] In certain embodiments, the promoter is a constitutive promoter, an inducible promoter, a ubiquitous promoter, or a tissue specific promoter.

[0066] In certain embodiments, the vector is a plasmid.

[0067] In certain embodiments, the vector is a retroviral vector, a phage vector, an adenoviral vector, a herpes simplex viral (HSV) vector, an AAV vector, or a lentiviral vector.

[0068] In certain embodiments, the AAV vector is a recombinant AAV vector of the serotype AAV1, AAV2, AAV4, AAV5, AAV6, AAV7, AAVrh74, AAV8, AAV9, AAV10, AAV 11, AAV 12, or AAV 13.

[0069] Another aspect of the invention provides a delivery system comprising (1) a delivery vehicle, and (2) the engineered Cas13 of the invention, the polynucleotide of the invention, or the vector of the invention.

[0070] In certain embodiments, the delivery vehicle is a nanoparticle, a liposome, an exosome, a microvesicle, or a gene-gun.

[0071] Another aspect of the invention provides a cell or a progeny thereof, comprising the engineered Cas13 of the invention, the polynucleotide of the invention, or the vector of the invention.

[0072] In certain embodiments, the cell or progeny thereof is a eukaryotic cell (e.g., a non-human mammalian cell, a human cell, or a plant cell) or a prokaryotic cell (e.g., a bacteria cell).

[0073] Another aspect of the invention provides a non-human multicellular eukaryote comprising the cell of the invention.

[0074] In certain embodiments, the non-human multicellular eukaryote is an animal (e.g., rodent or primate) model for a human genetic disorder.

[0075] Another aspect of the invention provides a method of modifying a target RNA, the method comprising contacting the target RNA with a CRISPR-Cas13 complex comprising the engineered Cas13 of the invention, and a spacer sequence complementary to at least 15 nucleotides of the target RNA; wherein upon binding of the complex to the target RNA through the spacer sequence, engineered Cas13 modifies the target RNA.

[0076] In certain embodiments, the target RNA is modified by cleavage by the engineered Cas13.

[0077] In certain embodiments, the target RNA is an mRNA, a tRNA, an rRNA, a non-coding RNA, an lncRNA, or a nuclear RNA.

[0078] In certain embodiments, upon binding of the complex to the target RNA, the engineered Cas13 does not exhibit substantial (or detectable) collateral RNase activity.

[0079] In certain embodiments, the target RNA is within a cell.

[0080] In certain embodiments, the cell is a cancer cell.

[0081] In certain embodiments, the cell is infected with an infectious agent.

[0082] In certain embodiments, the infectious agent is a virus, a prion, a protozoan, a fungus, or a parasite.

[0083] In certain embodiments, the cell is a neuronal cell (e.g., astrocyte, glial cell (e.g., Muller glia cell, oligodendrocyte, ependymal cell, Schwan cell, NG2 cell, or satellite cell)).

[0084] In certain embodiments, the CRISPR-Cas13 complex is encoded by a first polynucleotide encoding the engineered Cas13 of the invention, and a second polynucleotide comprising or encoding a spacer RNA capable of binding to the target RNA, wherein the first and the second polynucleotides are introduced into the cell.

[0085] In certain embodiments, the first and the second polynucleotides are introduced into the cell by the same vector.

[0086] In certain embodiments, the method causes one or more of: (i) in vitro or in vivo induction of cellular senescence; (ii) in vitro or in vivo cell cycle arrest; (iii) in vitro or in vivo cell growth inhibition and/or cell growth inhibition; (iv) in vitro or in vitro induction of anergy; (v) in vitro or in vitro induction of apoptosis; and (vi) in vitro or in vitro induction of necrosis.

[0087] Another aspect of the invention provides a method of treating a condition or disease in a subject in need thereof, the method comprising administering to the subject a composition comprising a CRISPR-Cas complex comprising the engineered Cas13 of the invention or a polynucleotide encoding the same; and a spacer sequence complementary to at least 15 nucleotides of a target RNA associated with the condition or disease; wherein upon binding of the complex to the target RNA through the spacer sequence, the engineered Cas13 cleaves the target RNA, thereby treating the condition or disease in the subject.

[0088] In certain embodiments, the condition or disease is a neurological condition, a cancer or an infectious disease.

[0089] In certain embodiments, the cancer is Wilms' tumor, Ewing sarcoma, a neuroendocrine tumor, a glioblastoma, a neuroblastoma, a melanoma, skin cancer, breast cancer, colon cancer, rectal cancer, prostate cancer, liver cancer, renal cancer, pancreatic cancer, lung cancer, biliary cancer, cervical cancer, endometrial cancer, esophageal cancer, gastric cancer, head and neck cancer, medullary thyroid carcinoma, ovarian cancer, glioma, lymphoma, leukemia, myeloma, acute lymphoblastic leukemia, acute myelogenous leukemia, chronic lymphocytic leukemia, chronic myelogenous leukemia, Hodgkin's lymphoma, non-Hodgkin's lymphoma, or urinary bladder cancer.

[0090] In certain embodiments, the neurological condition is glaucoma, age-related RGC loss, optic nerve injury, retinal ischemia, Leber's hereditary optic neuropathy, a neurological condition associated with degeneration of RGC neurons, a neurological condition associated with degeneration of functional neurons in the striatum of a subject in need thereof, Parkinson's disease, Alzheimer's disease, Huntington's disease, Schizophrenia, depression, drug addiction, movement disorder such as chorea, choreoathetosis, and dyskinesias, bipolar disorder, Autism spectrum disorder (ASD), or dysfunction.

[0091] In certain embodiments, the method is an in vitro method, an in vivo method, or an ex vivo method.

[0092] Another aspect of the invention provides A CRISPR-Cas complex comprising the engineered Cas13 of the invention, a guide RNA comprising a DR sequence that binds the engineered Cas13 and a spacer sequence designed to be complementary to and binds a target RNA.

[0093] In certain embodiments, the target RNA is encoded by a eukaryotic DNA.

[0094] In certain embodiments, the eukaryotic DNA is a non-human mammalian DNA, a non-human primate DNA, a human DNA, a plant DNA, an insect DNA, a bird DNA, a reptile DNA, a rodent DNA, a fish DNA, a worm/nematode DNA, a yeast DNA.

[0095] In certain embodiments, the target RNA is an mRNA.

[0096] In certain embodiments, the CRISPR-Cas complex further comprises a target RNA comprising a sequence capable of hybridizing to the spacer sequence.

[0097] Another aspect of the invention provides a method of identifying an engineered CRISPR/Cas effector enzyme of a corresponding wild-type Cas effector enzyme, wherein the engineered Cas substantially maintains guide-sequence-specific endonuclease activity and substantially lacks guide-sequence-independent collateral endonuclease activity, the method comprising: (1) in each of one or more regions of 15-20 consecutive polynucleotides (a) within 80, 90, 100, 110, 120, 130, 140, 150, 160, 170, or 180 residues of any residues of a endonuclease catalytic domain of the wild-type Cas effector enzyme or (b) spatially within 1-10 Ångström of any residues of the endonuclease catalytic domain of the wild-type Cas effector enzyme, substituting one or more (e.g., substantially all, except for up to 1, 2, 3, 4, or 5) polar and charged residues with a charge neutral aliphatic side-chain residue (such as A); and, (2) identifying engineered Cas substantially maintains guide-sequence-specific endonuclease activity and substantially lacks guide-sequence-independent collateral endonuclease activity compared to the corresponding wild-type Cas.

[0098] In certain embodiments, the wild-type Cas effector enzyme is a Cas13.

[0099] In certain embodiments, the Cas13 is a Cas13a, a Cas13b, a Cas13c, a Cas13d (e.g., CasRx), a Cas13e, or a Cas13f.

[0100] In certain embodiments, the Cas13e has the amino acid sequence of SEQ ID NO: 4; or wherein the Cas13d has the amino acid sequence of SEQ ID NO: 101; or wherein the Cas13f has the amino acid sequence of SEQ ID NO: 52.

[0101] Another aspect of the invention provides a method of identifying an engineered Clustered Regularly Interspaced Short Palindromic Repeat (CRISPR)-Cas13 effector enzyme with altered guide sequence-independent collateral nuclease activity, the method comprising: in a region spatially close to an endonuclease catalytic domain of the corresponding wild-type Cas13 effector enzyme, substituting one or more charged or polar residues to a charge-neutral short chain aliphatic residue (such as A), to determine whether the resulting variant Cas13 effector enzyme: (1) has substantially preserved guide sequence-specific endonuclease cleavage activity of the wild-type Cas13 (or theoretical maximum thereof) towards a target RNA complementary to the guide sequence; and, (2) either substantially lacks or has enhanced guide sequence-independent collateral endonuclease cleavage activity of the wild-type Cas13 (or theoretical maximum thereof) towards a non-target RNA that does not bind to the guide sequence, thereby identifying said engineered Cas13 effector enzyme with altered guide sequence-independent collateral nuclease activity.

[0102] In certain embodiments, the engineered Cas13 effector enzyme substantially lacks guide sequence-independent collateral nuclease activity.

[0103] In certain embodiments, the engineered Cas13 effector enzyme has enhanced guide sequence-independent collateral nuclease activity.

[0104] In certain embodiments, said one or more charged or polar residues are within a stretch of 15-20 (e.g., 16 or 17) consecutive amino acids within the region.

[0105] In certain embodiments, said one or more charged or polar residues comprise, consist essentially of, or consist of one or more (or all) Tyr (Y) residue(s) within the stretch.

[0106] It should be understood that any one embodiment of the invention described herein, including those described only in the examples or claims, or only in one aspects/sections below, can be combined with any other one or more embodiments of the invention, unless explicitly disclaimed or improper.

### BRIEF DESCRIPTION OF THE DRAWINGS

[0107] FIG. 1 is a schematic (not to scale) illustration of a possible mechanism of reduced collateral effect by a Cas13 (e.g., Cas13e) effector enzyme. The upper left panel shows a possible mechanism of sequence-specific targeting and cleavage of a target RNA by wild-type Cas13e. The upper right panel shows a possible mechanism of non-sequence-specific targeting and cleavage of non-target RNA by wild-type Cas13e. The lower left panel shows a possible mechanism of action by a subject engineered Cas13e with reduced affinity for non-target RNA and higher tendency to cleave target RNA in a sequence-specific manner.

[0108] FIG. 2 shows a predicted 3D structure of a Cas13e protein.

[0109] FIG. 3 shows the locations of the mutations in the engineered Cas13e mapped to the wild-type Cas13e sequence (SEQ ID NO: 4). The two HEPN sequences (HEPN1 and HEPN2) are also shown.

[0110] FIG. 4 is a schematic drawing (not to scale) of the double-fluorescent vector used to identify the subject engineered Cas13e effector proteins. The guide RNA (gRNA) encoded by the vector targets an EGFP reporter. Boxes with dashed lines include the two HEPN RXXXXH sequences (HEPN1 and HEPN2) and their respective nearby sequences (residues 2-187 and 634-755), as well as a sequence (residues 227-242) predicted to be spatially close to the HEPN sequences in Cas13e. Mutations with desired functional changes in those regions were identified in engineered Cas13e.

[0111] FIG. 5 shows the relative fluorescent intensity distribution among the various engineered Cas13e effector enzymes (Mut-1 to Mut-21) and Cas13e wild-type positive and negative controls, each shown as the intensity difference between the targeted (guide sequence-specific cleavage of) EGFP signal (left panel) and the control mCherry signal (right panel).

[0112] FIG. 6 shows the relative percentage of mCherry positive cells, upon comparing the various engineered Cas13e effector enzymes to wild-type or dCas13e (nuclease null mutant), after activating Cas13e nuclease activity using guide-sequence specific cleavage of EGFP. Engineered Cas13e effector enzymes with close to 100% relative percentage of mCherry positive cells have no or nearly no non-sequence-specific endonuclease activity, like dCas13e (which has neither sequence-specific nor non-sequence-specific endonuclease activity).

[0113] FIG. 7 shows the relative percentage of EGFP positive cells, upon comparing the various engineered Cas13e effector enzymes to wild-type or dCas13e (nuclease null mutant), after activating Cas13e nuclease activity using guide-sequence specific cleavage of EGFP. Engineered Cas13e effector enzymes with close to wild-type Cas13e relative percentage (e.g., about 20%) of EGFP positive cells have comparable level of sequence-specific endonuclease activity as wild-type Cas13e.

[0114] FIG. 8 shows the spacial distribution of the various mutations with reduced collateral effect, in the predicted Cas13e 3D structure.

[0115] FIG. 9 shows the sequences of several mutations in the Mut-17 region. FIG. 9 discloses SEQ ID NOs: 28, 29, and 36-43, respectively, in order of appearance.

[0116] FIG. 10 shows the relative percentage of mCherry positive cells, upon comparing the various engineered Cas13e effector enzymes to wild-type or dCas13e (nuclease null mutant), after activating Cas13e nuclease activity using guide-sequence specific cleavage of EGFP. Engineered Cas13e effector enzymes with close to 100% relative percentage of mCherry positive cells have no or nearly no non-sequence-specific endonuclease activity, like dCas13e (which has neither sequence-specific nor non-sequence-specific endonuclease activity).

[0117] FIG. 11 shows the relative percentage of EGFP positive cells, upon comparing the various engineered Cas13e effector enzymes to wild-type or dCas13e (nuclease null mutant), after activating Cas13e nuclease activity using guide-sequence specific cleavage of EGFP. Engineered Cas13e effector enzymes with close to wild-type Cas13e relative percentage (e.g., about 20%) of EGFP positive cells have comparable level of sequence-specific endonuclease activity as wild-type Cas13e.

[0118] FIG. 12 shows the sequences of the mutations in the Mut-19 region. FIG. 12 discloses SEQ ID NOs: 32 and 44-49, respectively, in order of appearance.

[0119] FIG. 13 shows the relative percentage of mCherry positive cells, upon comparing the various engineered Cas13e effector enzymes to wild-type or dCas13e (nuclease null mutant), after activating Cas13e nuclease activity using guide-sequence specific cleavage of EGFP. Engineered Cas13e effector enzymes with close to 100% relative percentage of mCherry positive cells have no or nearly no non-sequence-specific endonuclease activity, like dCas13e (which has neither sequence-specific nor non-sequence-specific endonuclease activity). M17.15-1 and M17.15-2 are the same, and are both double mutants with both Y-to-A mutations in M17.8 and M17.9 (see FIG. 9).

[0120] FIG. 14 shows the relative percentage of EGFP positive cells, upon comparing the various engineered Cas13e effector enzymes to wild-type or dCas13e (nuclease null mutant), after activating Cas13e nuclease activity using guide-sequence specific cleavage of EGFP. Engineered Cas13e effector enzymes with close to wild-type Cas13e relative percentage (e.g., about 20%) of EGFP positive cells have comparable level of sequence-specific endonuclease activity as wild-type Cas13e.

[0121] FIG. 15 is a schematic drawing showing the domain structures for representative Cas13a-Cas13f effector enzymes. The overall sizes, and the locations of the two RXXXXH motifs on each representative member of the representative Cas13 proteins are indicated.

[0122] FIGS. 16A-16D show the results of evaluating collateral effects in transiently transfected mammalian cell HEK293T using the dual-fluorescence reporter system of the invention.

[0123] FIG. 16A is a schematic drawing of the mammalian dual-fluorescence reporter system used to evaluate collateral effects induced by Cas13 (Cas13d/Cas13a)-mediated RNA knockdown. The exemplary dual-fluorescence reporter used herein contains one plasmid with coding sequences for Cas13 (with NLS) and EGFP under the transcription control of the strong CAG promoter, and another plasmid with coding sequences for the various gRNA targeting endogenous or exogenous targets (e.g., mCherry, NT, or RPL4, under the transcriptional control of the U6 promoter) and mCherry (under the transcriptional control of the EF1α promoter). NLS, nuclear localization signal; DR: direct repeat; P2A: 2A peptide from porcine teschovirus-1 promoter; and pA: polyA signal. HEK293T cells transfected by the dual-fluorescence reporter system plasmids are subjected to FACS analysis for EGFP (non-specific target) and mCherry (specific target) expression 48 hrs post transfection. Representative FACS analysis data of Cas13d/Cas13a-mediated mCherry and EGFP RNA knockdown with three different mCherry gRNAs in HEK293T cells, compared with NT, and representative FACS analysis data of mCherry and EGFP RNA knockdown induced by Cas13d with four different RPL4 gRNAs in HEK293T cells, compared with NT, are not shown.

[0124] FIG. 16B shows the bar graphs summarizing the relative knockdown of exogenous gRNA specific target mCherry and exogenous collateral target EGFP transcripts induced by Cas13d (left panel) or Cas13a (middle panel) with three different mCherry gRNAs, as well as the relative knockdown of the endogenous gRNA specific RPL4 and exogenous collateral target EGFP transcripts induced by Cas13d with four different RPL4 gRNAs (right panel). Knockdown relative to a NT gRNA was determined by qPCR. NT: non-targeting gRNA. All values are mean±s.e.m. (n=3), unless otherwise noted. Two-tailed unpaired two-sample t-test was used for statisticalal analysis. *P<0.05, **P<0.01, ***P<0.001, ns, no significance.

[0125] FIG. 16C shows FACS quantitative analysis of relative percentage of EGFP or mCherry positive cells from these experiments. NT: non-targeting gRNA. All values are mean±s.e.m. (n=3), unless otherwise noted. Two-tailed unpaired two-sample t-test was used for statisticalal analysis. *P<0.05, **P<0.01, ***P<0.001, ns, no significance.

[0126] FIG. 16D shows characteristics collateral effects of Cas13-mediated endogenous transcripts knockdown in HEK293T cells. Representative bright-field, fluorescence images, and flow cytometry images of cells with reduced mCherry and EGFP fluorescence intensity using Cas13d knockdown of three endogenous transcripts (RPL4, PFN1, PKM), each with four gRNAs, were not shown. However, differential decreases of relative percentage of EGFP or mCherry positive cells were induced by Cas13d targeting PFN1 (left panel) and PKM (right panel) transcript, with four gRNAs each transcript. NT: non-targeting gRNA. All values are mean±s.e.m. (n=3), unless otherwise noted. Two-tailed unpaired two-sample t-test was used for statisticalal analysis. *P<0.05, **P<0.01, ***P<0.001, ns, no significance.

[0127] FIGS. 17A-17H show results of rational mutagenesis of Cas13d to eliminate collateral activity. FIG. 17A is a schematic drawing of the mammalian dual-fluorescence reporter system used to screen on-target interference activity of Cas13 (shown as Cas13d but broadly represent all Cas13, including Cas13a, Cas13b, Cas13c, Cas13d, Cas13e, and Cas13f, etc.), with coding sequences for Cas13, EGFP (target in this experiment), mCherry (collateral target in this experiment) and EGFP gRNA all in one plasmid. Wild-type (wt) Cas13 cleaves the target EGFP mRNA via the gRNA-specific mechanism and the non-target mCherry mRNA via the collateral activity. dCas13 does not cleave either mCherry or EGFP mRNA for lack of endonuclease activity. The subject engineered Cas13 mutants/variants preserved gRNA-specific EGFP cleavage, but lost the collateral activity against mCherry mRNA. FIG. 17B shows a view of the predicted overall structure (by I-TASSER) of the RfxCas13d complex in ribbon representation. RXXXXH of HEPN domains are the catalytic sites. FIG. 17C shows the 21 regions in HEPN1 (including HEPN1-I and HEPN1-II), HEPN2, Helical2 and partial Helical1 domains of Cas13d selected for mutagenesis studies, with each spanning about 36-amino acids. FIG. 17D shows quantification of relative percentage of EGFP or mCherry positive cells among 118 Cas13d mutants targeting EGFP transcript. WT (wild-type Cas13d) and dead Cas13d (dCas13d) as controls, relative percentages of positive cell were all normalized to dCas13d. FIG. 17E shows quantification of relative percentage of EGFP or mCherry positive cells among Cas13d mutants with different combinations of mutation sites within or nearby N2V7 and N2V8. WT (wild-type Cas13d) and dead Cas13d (dCas13d) as controls, relative percentages of positive cell were all normalized to dCas13d. Representative FACS analysis of mCherry and EGFP knockdown induced by Cas13d mutants with EGFP gRNA is not shown. FIG. 17F shows differential changes of relative percentage of mCherry and EGFP positive cells were induced by cfCas13d with EGFP gRNAs in comparison with Cas13d, dCas13d as control. FIGS. 17G and 17H show kinetics of in vitro nuclease activity for Cas13 enzymes. In vitro collateral ribonuclease activity (FIG. 17G) analysis and target ribonuclease activity (FIG. 17H) analysis of Cas13d, cfCas13d, and dCas13d with off-target or on-target synthetic ssRNA fluorescence probes.

[0128] FIGS. 18A and 18B show the cartoon view (FIG. 18A) and opposing surface view (FIG. 18B) of the crystal structure of Cas13d, including the catalytic sites of the HEPN domains (labeled by RXXXXH), and effective mutated sites (labeled by the various NxVy mutations).

[0129] FIG. 18C shows mutated sequences of effective variants from Cas13d. FIG. 18C discloses SEQ ID NOs: 948, 949, 561, 950-955, 561, 950, 951, 601, 615, and 625, respectively, in order of columns.

[0130] FIGS. 19A-19I show results of rational mutagenesis of Cas13e to improve nuclease specificity. FIG. 19A shows a view of the predicted overall structure of the Cas13e complex in ribbon representation. RXXXXH of HEPN domains are catalytic sites. FIG. 19B shows a mutagenesis scheme according to which the HEPN1 and HEPN2 domains were mainly selected and divided into 21 mutant regions for further subsequent mutagenesis. FIG. 19C shows quantification of relative percentage of EGFP or mCherry positive cells among Cas13e mutants targeting EGFP transcript. WT (wild-type Cas13e) and dead Cas13e (dCas13e) were used as positive and negative controls, respectively, and the relative percentages of positive cell were all normalized to dCas13e. FIG. 19D shows quantification of relative percentage of EGFP or mCherry positive cells among Cas13e mutants from different combinations of mutation sites based on M17 targeting EGFP transcript. Cas13e and dCas13e as used as controls. FIGS. 19E and 19F show kinetics of in vitro nuclease activity for Cas13 enzymes. In vitro collateral ribonuclease activity (FIG. 19E) analysis and target ribonuclease activity (FIG. 19F) analysis of Cas13e, cfCas13e, and dCas13e with off-target or on-target synthetic ssRNA fluorescence probes. FIG. 19G shows differential changes of mCherry and EGFP fluorescence intensity induced by cfCas13e with EGFP gRNAs in comparison with Cas13e. FIG. 19H is a schematic diagram showing the AAV vector genome encoding cfCas13e (collateral activity free Cas13e) and guide RNAs targeting VEGFA, and results of target mRNA knock-down. FIG. 19I shows knock down of target mRNA using cfCas13e in a dose-dependent manner and results comparison with two comparator drugs.

[0131] FIGS. 20A-20I show efficient and specific interference activity of cfCas13d targeting endogenous genes in HEK293 cells. FIG. 20A shows relative expression level (as measured by CPM, counts per million) of 23 endogenous genes in HEK293 cells from RNA-seq of dCas13d groups. FIG. 20B shows differential decreases of relative percentage of EGFP or mCherry positive cells induced by Cas13d targeting 22 endogenous transcripts, with 1-7 gRNAs each transcript, compared with NT. FIG. 20C shows statisticalal quantification from FIG. 20B. FACS images of differential decreases of mCherry and EGFP fluorescence intensity induced by dCas13d/Cas13d/cfCas13d with gRNA targeting RPL4, PPIA or RPS5 transcripts were not shown, but FACS quantitative analysis of relative percentage of EGFP or mCherry positive cells from such FACS analysis is shown in FIGS. 20D-20G. FIG. 20H shows Cas13d and cfCas13d targeting of 14 endogenous transcripts in HEK293 cells. Transcript levels are relative to dCas13d as vehicle control. FIG. 20I shows statisticalal data analysis from FIG. 20H. NT: non-targeting gRNA. All values are mean±s.e.m. (n=3), unless otherwise noted. Two-tailed unpaired two-sample t-test was used. *P<0.05, **P<0.01, ***P<0.001, ns, no significance.

[0132] FIGS. 20J and 20K show differential gene expression of Cas13d/cfCas13d targeting CA2/B4GALNT1 transcripts by flow cytometry analysis. FACS images of differential decreases of mCherry and EGFP fluorescence intensity induced by dCas13d/Cas13d/cfCas13d with targeting CA2 or B4GALNT1 transcript gRNA were not shown, but FACS quantitative analysis of relative percentage of EGFP or mCherry positive cells were shown in FIGS. 20J and 20K. All values are mean±s.e.m. (n=3), unless otherwise noted. Two-tailed unpaired two-sample t-test was used for statisticalal analysis. *P<0.05, **P<0.01, ***P<0.001, ns, no significance.

[0133] FIGS. 21A-21E show the results of transcriptome-wide off-target edits analysis of Cas13d/cfCas13d targeting endogenous transcript. FIG. 21A shows characteristic of gRNA dependent off-target sites from RPL4-g3, PPIA-g1, CA2-g1 or PPARG-g1, measured in Cas13d and cfCas13d groups. MM #, mismatch number of off-target sites. FIG. 21A discloses SEQ ID NOs: 956, 956, 956-958, and 958-970, respectively, in order of appearance. FIG. 21B shows statisticalal data analysis from FIG. 21A, of which off-target sites with one or more mismatches were analyzed. FIGS. 21C-21D show biological process of significant down-regulated genes induced by Cas13d/cfCas13d-mediated RPL4 (FIG. 21C)/PPIA (FIG. 21D) knockdown. In FIGS. 21C and 21D, the relevant genes are 0008219 (cell death), 0007049 (cell cycle), 0009056 (catabolic process), 0007165 (signal tranduction), 0009058 (biosynthetic process), 0051716 (cellular response to stimulus), 0071704 (organic substance metabolic process), and 0071840 (cellular component organization or biogenesis). In FIG. 21E, characteristic of gRNA dependent off-target sites from RPL4-g1 or PPIA-g2 were measured in Cas13d and cfCas13d groups. MM #, mismatch number of off-target sites. FIG. 21E discloses SEQ ID NOs: 971 and 971-975, respectively, in order of appearance.

[0134] FIGS. 22A-22C show cellular consequences and working model of collateral effects and its elimination. FIG. 22A is a schematic drawing of the dox-inducible Cas13d/cfCas13d/dCas13d expression system with RPL4 gRNA1 used to examine collateral effects. Representative bright-field images of HEK293T cell clones with dox-inducible Cas13d/cfCas13d/dCas13d expression system during 5 days after dox treatment were not shown. FIG. 22B left panel shows relative RPL4 mRNA knockdown by dCas13d/Cas13d/cfCas13d with RPL4 gRNA in the presence or absence of dox during 5 days. The two middle panels show growth curve and MTT assay of dCas13d, Cas13d, or cfCas13d cell clones treated with/without dox during 5 or 6 days (n=3). The right panel shows statistical analysis from the first three panels. FIG. 22C is a model of Cas13 on-target and collateral cleavage activity. Once activated by target RNA, cfCas13 (e.g., cfCas13d and cfCas13e) with mutant sites maintains on-target cleavage activity but eliminates collateral cleavage activity, while wtCas13 exhibits both cleavage activity. All values are mean±s.e.m. (n=3), unless otherwise noted. Two-tailed unpaired two-sample t-test was used for statisticalal analysis. *P<0.05, **P<0.01, ***P<0.001, ns, no significance.

[0135] FIGS. 23A-23J is an exemplary multi-sequence alignment of several representative Cas13 family proteins (e.g., Cas13b, Cas13e and Cas13f), and the domain organizations including the HPEN domains. FIGS. 23A-23J disclose SEQ ID NOs: 4, and 976-994, respectively, in order of appearance.

[0136] FIGS. 24A-24M is an exemplary multi-sequence alignment of several representative Cas13 family proteins (e.g., Cas13d, Cas13a and Cas13c), and the domain organizations including the HPEN domains. FIGS. 24A-24M disclose SEQ ID NOs: 101, 995-1008, 1007, 1009-1023, and 855, respectively, in order of appearance.

[0137] FIG. 25 is a schematic drawing of the mammalian dual-fluorescence reporter system used to screen on-target interference activity of Cas13f, with the Cas13f coding sequences, the EGFP target, the mCherry collateral target, and the EGFP gRNA in one plasmid. Wild-type (wt) Cas13f cleaves the target EGFP mRNA via gRNA-specific mechanism, and the non-target mCherry mRNA via its collateral activity. dCas13f cleaves neither mCherry nor EGFP mRNA, for lack of endonuclease activity. The subject engineered Cas13f mutants/variants preserved gRNA-specific EGFP cleavage, but lost its collateral activity against the mCherry mRNA.

[0138] FIG. 26 shows a view of the predicted overall structure (by I-TASSER) of the Cas13f.1 complex in ribbon representation. RXXXXH motifs of the HEPN domains are the catalytic sites.

[0139] FIG. 27 shows the 47 regions in HEPN1, HEPN2, Helical1 (including Hel1-1, Hel1-2 and Hel1-3) and Helical2 domains of Cas13f selected for mutagenesis, with each spanning about 17-amino acids.

[0140] FIG. 28 shows quantification of the relative percentages of EGFP or mCherry⁺ cells among 75 Cas13f mutants targeting EGFP transcript. WT (wild-type) Cas13f and dead Cas13f (dCas13f) are controls. Relative percentages of positive cell were normalized to dCas13df.

[0141] FIG. 29 shows quantification of relative percentages of EGFP or mCherry⁺ cells among Cas13f mutants with different combinations of mutation sites within or nearby F10V1, F10V4, F38V2, F40V2, F40V4, F46V1 and F46V3. WT (wild-type) Cas13f and dead Cas13f (dCas13f) are controls. Relative percentages of positive cell were normalized to dCas13f. Representative FACS analysis of mCherry and EGFP knock-down induced by Cas13f mutants with EGFP gRNA is not shown.

### DETAILED DESCRIPTION OF THE INVENTION

### 1. Overview

[0142] A broad range of CRISPR-Cas systems has been discovered, and a classification system and a common nomenclature have been established for the associated Cas genes. Under such classification system, the CRISPR-Cas systems and the associated effector enzymes belong to two classes—Class 1 and Class 2—each further divided into three types and numerous subtypes based on their signature Cas genes. The Class 1 systems encompass types I, III, and IV systems, utilizing multisubunit RNA-Protein (RNP) complexes. The Class 2 systems encompass types II, V, and VI systems, utilizing single protein RNP complexes.

[0143] Cas9 is a Class 2, type II effector enzyme, while the recently discovered Cas13 enzymes, including Cas13a, Cas13b, Cas13c, Cas13d (including the engineered variant CasRx), Cas13e, and Cas13f are Class 2, type VI effector enzymes. Unlike any other CRISPR-Cas systems, Class 2 type VI effector proteins have been demonstrated to exclusively cleave RNA targets. Such Class 2 type VI effector enzymes have two distinct active sites, both conferring RNase activity: one involved in pre-crRNA processing, the other involved in target RNA degradation.

[0144] Several subtypes of Class 2 type VI exist, including at least subtype VI-A (Cas13a/C2c2), VI-B (Cas13b1 and Cas13b2), VI-C (Cas13c), VI-D (Cas13d, CasRx), VI-E (Cas13e), and VI-F (Cas13f). The Cas13 subtypes generally share very low sequence identity/similarity, but can all be classified as type VI Cas proteins (e.g., generally referred to herein as “Cas13”) based on the presence of two conserved HEPN-like RNase domains. See FIG. 15. Although these two domains appear to be a conserved feature of Cas13 enzymes and are typically located close to the two terminal ends, their spacing within the protein appears to be unique for each subtype. At least three crystal structures for type VI-A Cas13a proteins have been published, including Cas13a from Leptotrichia shahii (LshCas13a), Lachnospiraceae bacterium (LbaCas13a), and Leptotrichia buccalis (LbuCas13a). Similar to other Class 2 complexes, the crRNA-Cas13a complex is bi-lobed with a nuclease (NUC) lobe and a crRNA recognition (REC) lobe. The crRNA-bound form of Cas13a adopts a “clenched fist”-like structure, with the REC lobe being imperfectly stacked on top of the NUC lobe. The REC lobe has a variable N-terminal domain (NTD), followed by a helical domain (Helical-1). Meanwhile, the NUC lobe consists of the two HEPN domains (HEPN-1 and HEPN-2) separated by a linker domain (Helical-3). In addition, the HEPN-1 domain is split into two subdomains by another helical domain (Helical-2). The NTD, Helical-1, and HEPN2 domains form a narrow, positively charged cleft that anchors the 5′ repeat-derived end of the bound crRNA (the 5′-handle), whereas the 3′ end of the crRNA is bound by the Helical-2 domain.

[0145] The Cas13 CRISPR locus is initially transcribed into a long pre-crRNA transcript. The Cas13 proteins then cleave the pre-crRNA at fixed positions upstream of the stem-loop structure formed by the palindromic nature of the direct repeat (DR) sequences. Pre-crRNA processing in type VI involves metal-independent cleavages upstream of the stem-loop, and does not require a trans-activating crRNA (tracrRNA) or other host factors. The mature crRNA, which comprises a DR sequence and a guide sequence complementary to a target RNA, assembles with the Cas13 proteins to form a functional RNP complex, which then scans transcripts for the complementary RNA target. Once such RNA target is found and bound by the guide sequence, the RNA target is degraded by the Cas13 endonuclease.

[0146] The Cas13 effector enzymes display unprecedented sensitivity to recognize specific target RNAs within a heterogeneous population of non-target RNAs. It has been reported that Cas13 can detect target RNAs with femtomolar sensitivity. Thus on the one hand, the Class 2 type VI enzymes or Cas13 offer tremendous opportunity to knock down target gene products (e.g., mRNA) for gene therapy, yet on the other hand, such use is inherently limited by the co-called collateral activity that poses significant risk of cytotoxicity.

[0147] Specifically, in Class 2 type VI systems, a guide sequence non-specific RNA cleavage, referred to as “collateral activity,” is conferred by the higher eukaryotes and prokaryotes nucleotide-binding (HEPN) domain in Cas13 after target RNA binding. Binding of its cognate target ssRNA complementary to the bound crRNA causes substantial conformational changes in Cas13 effector enzyme, leading to the formation of a single, composite catalytic site for guide-sequence independent “collateral” RNA cleavage, thus converting Cas13 into a sequence non-specific ribonuclease. This newly formed highly accessible active site would not only degrade the target RNA in cis if the target RNA is sufficiently long to reach this new active site, but also degrade non-target RNAs in trans based on this promiscuous RNase activity.

[0148] Most RNAs appear to be vulnerable to this promiscuous RNAse activity of Cas13, and most (if not all) Cas13 effector enzymes possess this collateral endonuclease activity. It has been shown recently that the collateral effects by Cas13-mediated knockdown exist in mammalian cells and animals (manuscript submitted), suggesting that clinical application of Cas13-mediated target RNA knock down will face significant challenge in the presence of collateral effect.

[0149] The existence of substantial collateral effects of Cas13-mediated RNA knockdown has been demonstrated using a dual-fluorescent reporter system of the invention as described herein. Such collateral effects have been observed for both exogenous and endogenous genes in mammalian cells. In particular, wild-type Cas13d with this collateral effect was found to induce transcriptome-wide off-target editing and cell growth arrest.

[0150] Thus, in order to use the Cas13 enzymes for specifically knocking down a target RNA in gene therapy, it is evident that this guide-sequence non-specific collateral activity must be tightly controlled to prevent unwanted spontaneous cellular toxicity. Through unclear mechanism, subtype VI-B systems include a natural means to regulate the collateral activity of Cas13b via the type VI-associated genes csx27 and csx28, but such natural regulatory mechanism appears to be unique to subtype VI-B, as similar mechanism does not seem to exist in other subtypes such as type VI-A and VI-C.

[0151] Using this same reporter system of the invention, about 200 Cas13d and Cas13e variants obtained by structure-guided mutagenesis were screened. It was found that several variants with 2-4 mutations on the Higher Eukaryotes and Prokaryotes Nucleotide-binding (HEPN) domains retained undiminished on-target activity, but greatly reduced collateral effects. For the Cas13d variant with diminished collateral effect, the transcriptome-wide off-target editing and cell growth arrest observed in wild-type Cas13d were eliminated.

[0152] Interestingly, it was found that the majority of variants exhibited either low dual cleavage activity, or high on-target cleavage activity but low collateral cleavage activity. However, there is almost no variants showing low on-target cleavage activity but high collateral cleavage activity. These results suggest a distinct binding mechanism between on-target and collateral cleavage activity.

[0153] While not wishing to be bound by any particular theory, Applicant believes the following model of target (e.g., gRNA-specific) and collateral cleavage activity aids the rationale design of collateral effect-free variants of the Cas13 effector enzymes. Specifically, as shown in FIG. 22C, Cas13 is believed to contain two separated binding domains proximal to the HEPN domains—one is responsible for on-target cleavage, and both are required for collateral cleavage. Consistent with this model, mutations designed on the N1V7, N2V7, N2V8 and N15V4 regions, surrounding the cleavage site, cause steric hindrance effects or change in charge, leading to weakened interactions between activated Cas13 and promiscuous RNA, but not much (if any) effect between activated Cas13 and the on-target RNA. Thus, mutagenesis on these binding sites abolishes the collateral cleavage activity of Cas13, while retaining the on-target cleavage activity of the corresponding wild-type Cas13.

[0154] Thus, the invention described herein provides engineered high-fidelity Class 2 type VI or Cas13 (e.g., Cas13d, Cas13e, and Cas13f) effector enzyme variants with minimal residual collateral effects. These variants are useful, for example, in targeting degradation of RNAs in basic research and therapeutic applications.

[0155] On the other hand, multiple low-fidelity Cas13 variants exhibiting increased dual cleavage activity were identified. Such variants have utility for better nucleic acid detection application (such as those used in the SHERLOCK assay).

[0156] Specifically, in one aspect, the invention provides engineered Class 2 type VI or Cas13 (e.g., Cas13d, e, or f) effector enzymes that largely maintain their sequence-specific endonuclease activity against a target RNA, yet with diminished if not eliminated non-guide sequence-specific endonuclease activity against non-target RNAs. Such engineered Cas13 effector enzymes that substantially lack collateral effect pave the way for using Cas13 in target RNA-knock down-based utility, such as gene therapy. Such engineered Cas13 effector enzymes that substantially lack collateral effect are also useful for RNA-base editing, because a nuclease dead version (or “dCas13”) of such engineered Cas13 also has reduced off-target effect, which is still present in dCas13 without the mutations in the subject engineered Cas13.

[0157] While not wishing to be bound by any particular theory, FIGS. 1 and 22C (see above) provide plausible mechanisms consistent with the data presented herein. In particular, in FIG. 1, a wild-type Cas13 not only possesses the ability to bind a target RNA through the guide sequence of the crRNA, but also possesses a non-specific RNA binding site (see the oval shaped motif around the catalytic site) for any RNA at the vicinity of the HEPN catalytic domains. Once the target RNA is recognized by the guide sequence, a conformation change of Cas13 activates its catalytic activity, and the target RNA, bound by both the complementary guide sequence and the non-specific RNA binding site, is cleaved. Once activated, Cas13 also non-specifically cleave non-target RNA that does not bind to the guide sequence, partly due to the binding of such non-target RNA to the non-specific RNA binding site on cas13. Mutations in the non-specific RNA binding motif (as signified by a different shade of the oval motif) reduces/eliminates (or in some cases enhances) the ability of Cas13 to bind RNA, thus collateral activity against non-target RNA is reduced/eliminated (or enhanced) without significantly affecting target RNA cleavage because the target RNA is still bound by the guide sequence.

[0158] According to this model, off-target effect in RNA-base editing using a nuclease-deficient (dCas13) version of the engineered Cas13 can also be reduced or eliminated, because the loss of non-specific RNA binding in the engineered dCas13 reduced/eliminates unintended RNA based editing due to the proximity of the RNA base editing domain (e.g., ADAR or CDAR) and an off-target RNA substrate.

[0159] In a related aspect, the invention also provides engineered Class 2 type VI or Cas13 (e.g., Cas13d, Cas13e, or Cas13f) effector enzymes that largely maintain their sequence-specific endonuclease activity against a target RNA, yet with enhanced non-guide sequence-specific endonuclease activity against non-target RNAs compared to the corresponding wild-type Cas13. Such engineered Cas13 with enhanced collateral effect provides a better (e.g., more sensitive) variant, compared to the wild-type, in nucleic acid detection assays such as SHERLOCK, which takes advantage of the collateral activity to provide an extreme sensitive assay for detecting very small quantities of a guide sequence-specific target RNA in a sample, with or without pre-amplification of the initial nucleic acids in the sample.

[0160] More specifically, one aspect of the invention provides an engineered Class 2 type VI Clustered Regularly Interspaced Short Palindromic Repeat (CRISPR)-Cas effector enzyme, such as Cas13 (e.g., Cas13d, Cas13e, or Cas13f) wherein the engineered Class 2 type VI Cas effector enzyme: (1) comprises a mutation in a region spatially close to an endonuclease catalytic domain of the corresponding wild-type effector enzyme; (2) substantially preserves guide sequence-specific endonuclease cleavage activity of the wild-type effector enzyme (or theoretical maximum thereof) towards a target RNA complementary to the guide sequence; and, (3) either substantially lacks or has enhanced guide sequence-independent collateral endonuclease cleavage activity of the wild-type effector enzyme (or theoretical maximum thereof) towards a non-target RNA that is substantially not complement to/does not bind to the guide sequence.

[0161] In certain embodiments, the guide sequence-specific endonuclease cleavage activity and the guide sequence-independent collateral endonuclease cleavage activity can both be measured as compared to the corresponding wild-type Cas13 effector enzymes (such as mutant Cas13e vs. wild-type Cas13e from which the mutant derives from), as normalized against a corresponding nuclease-deficient Cas13 (such as dCas13e).

[0162] The nuclease-deficient Cas13 may be lack of catalytic domain, motif, or key catalytic residues such that it exhibits no appreciable or detectable level of guide sequence-dependent target RNA endonuclease cleavage activity, as well as guide sequence-independent collateral endonuclease cleavage activity. Thus in the due reporter system described herein, dCas13 typically has 100% remaining/baseline EGFP signal as an indication of no appreciable or detectable level of guide sequence-dependent target RNA endonuclease cleavage activity, and has 100% remaining/baseline mCherry signal as an indication of no appreciable or detectable level of guide sequence-independent collateral endonuclease cleavage activity. Meanwhile, wild-type Cas13 typically exibit strong guide sequence-dependent target RNA endonuclease cleavage activity (as reflected by nearly 80%, 90%, 95%, or close to 100% reduction of the dCas13 EGFP reference signal). The theoretical maximum of such guide sequence-dependent target RNA endonuclease cleavage activity is 100%, which is equivalent to complete elimination of all dCas13 EGFP reference signal.

[0163] Wild-type Cas13 also typically exhibit various levels of guide sequence-independent collateral endonuclease cleavage activity, leading to about 50%-70% reduction of the dCas13 mCherry reference signal. The theoretical maximum of such guide sequence-independent collateral endonuclease cleavage activity is 100%, which is equivalent to complete elimination of all dCas13 mCherry reference signal.

[0164] In certain embodiments, the engineered Cas13 effector enzyme of the invention exhibits reduced or diminished guide sequence-independent collateral endonuclease cleavage activity compared to the corresponding wild-type Cas13 (or theoretical maximum thereof) from which the engineered Cas13 derives. For example, the engineered Cas13 effector enzyme may substantially lack (e.g., retains less than 50%, 40%, 35%, 30%, 27.5%, 25%, 22.5%, 20%, 17.5%, 15%, 12.5%, 10%, 7.5%, 5%, 4%, 3%, 2.5%, 2%, 1% or less of) guide sequence-independent collateral endonuclease cleavage activity of the wild-type Cas13 towards a non-target RNA that does not bind to the guide sequence. For example, if the wild-type Cas13 eliminates about 70% (with the theoretical maximum being 100% elimination) of the dCas13 mCherry baseline signal due to collateral activity, and the mutant Cas13 with diminished collateral activity only eliminates about 10% of the dCas13 mCherry baseline signal due to remaining collateral activity, the mutant only exhibits or retains about 1/7 (or about 15%) of the wild-type collateral activity (or 10% of the theoretical maximum).

[0165] In certain embodiments, the engineered Cas13 effector enzyme of the invention exhibits increased or enhanced guide sequence-independent collateral endonuclease cleavage activity compared to the corresponding wild-type Cas13 from which the engineered Cas13 derives. For example, the engineered Cas13 effector enzyme may have substantially enhanced or increased (e.g., has more than 100%, 110%, 120%, 130%, 140%, 150%, 160%, 170%, 180%, 190%, 200% or more of) guide sequence-independent collateral endonuclease cleavage activity of the wild-type Cas13 towards a non-target RNA that does not bind to the guide sequence. For example, if the wild-type Cas13 eliminates about 50% of the dCas13 mCherry baseline signal due to collateral activity, and the mutant Cas13 with enhanced collateral activity eliminates about 90% of the dCas13 mCherry baseline signal due to its enhanced collateral activity, the mutant exhibits about 90/50 (or about 180%) of the wild-type collateral activity.

[0166] In certain embodiments, the mutation occurs within a region, e.g., within one of two RNA binding domains at, near, or proximal to one of the HEPN-type catalytic domains, of a wild-type Cas13 (such as Cas13a, Cas13b, Cas13c, Cas13d, Cas13e, Cas13f etc). In certain embodiments, the mutation weakens (e.g., significantly weakens or eliminates) binding of the wild-type Cas13 to a non-specific RNA target (e.g., one not substantially complementary to a guide RNA), but substantially retains binding to a target RNA substantially complementary to the guide RNA. In certain embodiments, the mutation causes steric hindrance effects and/or change in charge, polarity, and/or size of the sidechain of the involved residues, leading to weakened interactions between activated Cas13 and promiscuous RNA, but not much (if any) effect between activated Cas13 and the on-target RNA.

[0167] As used herein, “Cas13” is a Class 2 type VI CRISPR-Cas effector enzyme that displays collateral activity as wild-type enzyme upon binding to a cognate target RNA complementary to a guide sequence of its crRNA. The collateral activity of a wild-type Class 2 type VI effector enzyme enables it to cleave RNase or endonuclease activity against a non-target RNA that does not or substantially does not complement with the guide sequence of the crRNA. The wild-type Class 2 type VI effector enzyme may also exhibit one or more of the following characteristics: having one or two conserved HEPN-like RNase domains, such as HEPN domains having the conserved RXXXXH motif (with X being any amino acid), e.g., the RXXXXH motifs described herein below; having a “clenched fist”-like structure when the Class 2 type VI effector enzyme (e.g., Cas13) binds a cognate crRNA; having a bi-lobed structure with a nuclease (NUC) lobe and a crRNA recognition (REC) lobe, optionally, the REC lobe has a variable N-terminal domain (NTD), followed by a helical domain (Helical-1), and/or optionally, the NUC lobe consists of the two HEPN domains (HEPN-1 and HEPN-2) separated by a linker domain (Helical-3), wherein the HEPN-1 domain is optionally split into two subdomains by another helical domain (Helical-2); processes pre-crRNA transcript into crRNA; does not require a trans-activating crRNA (tracrRNA) or other host factors for pre-crRNA processing; and exhibits femtomolar sensitivity to recognize guide sequence-specific target RNAs within a heterogeneous population of non-target RNAs.

[0168] In certain embodiments, the Class 2 type VI effector enzyme (e.g., Cas13) has one of the RXXXXN motifs in the HEPN-like domains located at or close to (e.g., within 50-160 residues, or within 10, 20, 30, 40, 50, 60, 70, 80, 90, 100, 110, 120, 130, 140, 150 or 160 residues of) the N-terminus. In certain embodiments, the Class 2 type VI effector enzyme (e.g., Cas13) has one of the RXXXXN motifs in the HEPN-like domains located at or close to (e.g., within 50-160 residues, or within 10, 20, 30, 40, 50, 60, 70, 80, 90, 100, 110, 120, 130, 140, 150 or 160 residues of) the C-terminus. In certain embodiments, the Class 2 type VI effector enzyme (e.g., Cas13) has one of the RXXXXN motifs of the HEPN-like domains located at or close to (e.g., within 50-160 residues, or within 10, 20, 30, 40, 50, 60, 70, 80, 90, 100, 110, 120, 130, 140, 150 or 160 residues of) the N-terminus, while the other of the RXXXXN of the HEPN-like domains is located at or close to (e.g., within 50-160 residues, or within 10, 20, 30, 40, 50, 60, 70, 80, 90, 100, 110, 120, 130, 140, 150 or 160 residues of) the C-terminus. An RXXXXN motif is “at or near” the N- or C-terminus, if either the R or the N residue of the RXXXXN motif is at or near the N- or C-terminus.

[0169] Based on biological and cellular experimental data, the engineered Class 2 type VI effector enzyme (e.g., Cas13 particularly Cas13e) effector enzymes have drastically reduced non-sequence-specific endonuclease activity against non-target RNAs, yet simultaneously exhibiting substantially the same if not higher sequence-specific endonuclease activity against a target RNA that substantially complements the guide sequence of the crRNA. The engineered effector enzymes enable high fidelity RNA targeting/editing.

[0170] In certain embodiments, the Class 2 type VI effector enzyme is Cas13a, Cas13b, Cas13c, Cas13d (including the engineered variant CasRx), Cas13e, or Cas13f, or an ortholog, paralog, homolog, natural or engineered variant thereof, or functional fragment thereof that substantially maintains the guide sequence-specific endonuclease activity.

[0171] In certain embodiments, the variant or functional fragment thereof maintains at least one function of the corresponding wild-type effector enzyme. Such functions include, but are not limited to, the ability to bind a guide RNA/crRNA of the invention (described herein below) to form a complex, the guide sequence-specific RNase activity, and the ability to bind to and cleave a target RNA at a specific site under the guidance of the crRNA that is at least partially complementary to the target RNA.

[0172] In certain embodiments, the Cas13 protein is a Cas13a protein. In some embodiments, the Cas13a protein is from a species of the genus Bacteroides, Blautia, Butyrivibrio, Carnobacterium, Chloroflexus, Clostridium, Demequina, Eubacterium, Herbinix, Insoliti spirillum, Lachnospiraceae, Leptotrichia, Listeria, Paludibacter, Porphyromonadaceae, Pseudobutyrivibrio, Rhodobacter, or Thalassospira. In certain embodiments, the Cas13a protein is from a species of Leptotrichia shahii, Listeria seeligeri, Lachnospiraceae bacterium (such as Lb MA2020, Lb NK4A179, Lb NK4A144), Clostridium aminophilum (such as Ca DSM 10710), Carnobacterium gallinarum (such as Cg DSM 4847), Paludibacter propionicigenes (such as Pp WB4), Listeria weihenstephanensis (such as Lw FSL R9-0317), Listeriaceae bacterium (such as Lb FSL M6-0635), Leptotrichia wadei (such as Lw F0279), Rhodobacter capsulatus (such as Rc SB 1003, Rc R121, Rc DE442), Leptotrichia buccalis (such as Lb C-1013-b), Herbinix hemicellulosilytica, Eubacteriaceae bacterium (such as Eb CHKCI004), Blautia. sp Marseille-P2398, Leptotrichia sp. oral taxon 879 str. F0557, Chloroflexus aggregans, Demequina aurantiaca, Thalassospira sp. TSLS-1, Pseudobutyrivibrio sp. OR37, Butyrivibrio sp. YAB3001, Leptotrichia sp. Marseille-P3007, Bacteroides ihuae, Porphyromonadaceae bacterium (such as Pb KH3CP3RA), Listeria riparia, or Insoliti spirillum peregrinum.

[0173] In certain embodiments, the Cas13a is any one of Cas13a disclosed in WO2020/028555 (incorporated herein by reference).

[0174] In some embodiments, the Cas13 protein is a Cas13b protein. In some embodiments, the Cas13b protein is from a species of the genus Alistipes, Bacteroides, Bacteroidetes, Bergeyella, Capnocytophaga, Chryseobacterium, Flavobacterium, Myroides, Paludibacter, Phaeodactylibacter, Porphyromonas, Prevotella, Psychroflexus, Reichenbachiella, Riemerella, or Sinomicrobium. In certain embodiments, the Cas13b protein is from a species Alistipes sp. ZOR0009, Bacteroides pyogenes (such as Bp F0041), Bacteroidetes bacterium (such as Bb GWA2319), Bergeyella zoohelcum (such as Bz ATCC 43767), Capnocytophaga canimorsus, Capnocytophaga cynodegmi, Chryseobacterium carnipullorum, Chryseobacterium jejuense, Chryseobacterium ureilyticum, Flavobacterium branchiophilum, Flavobacterium columnare, Flavobacterium sp. 316, Myroides odoratimimus (such as Mo CCUG 10230, Mo CCUG 12901, Mo CCUG 3837), Paludibacter propionicigenes, Phaeodactylibacter xiamenensis, Porphyromonas gingivalis (such as Pg F0185, Pg F0568, Pg JCVI SC001, Pg W4087, Porphyromonas gulae, Porphyromonas sp. COT-052 OH4946, Prevotella aurantiaca, Prevotella buccae (such as Pb ATCC 33574), Prevotella falsenii, Prevotella intermedia (such as Pi 17, Pi ZT), Prevotella pallens (such as Pp ATCC 700821), Prevotella pleuritidis, Prevotella saccharolytica (such as Ps F0055), Prevotella sp. MA2016, Prevotella sp. MSX73, Prevotella sp. P4-76, Prevotella sp. P5-119, Prevotella sp. P5-125, Prevotella sp. P5-60, Psychroflexus torquis, Reichenbachiella agariperforans, Riemerella anatipestifer, or Sinomicrobium oceani.

[0175] In certain embodiments, the Cas13b is any one of Cas13b disclosed in WO2020/028555 (incorporated herein by reference).

[0176] In some embodiments, the Cas13 protein is a Cas13c protein. In some embodiments, the Cas13c protein is from a species of the genus Fusobacterium or Anaerosalibacter. In certain embodiments, the Cas13c protein is from a species of Fusobacterium necrophorum (such as Fn subsp. funduliforme ATCC 51357, Fn DJ-2, Fn BFTR-1, Fn subsp. Funduliforme), Fusobacterium perfoetens (such as Fp ATCC 29250), Fusobacterium ulcerans (such as Fu ATCC 49185), or Anaerosalibacter sp. ND1.

[0177] In certain embodiments, the Cas13c is any one of Cas13c disclosed in WO2020/028555 (incorporated herein by reference).

[0178] In some embodiments, the Cas13 protein is a Cas13d protein. In some embodiments, the Cas13d protein is from a species of the genus Eubacterium or Ruminococcus. In certain embodiments, the Cas13d protein is from a species of Eubacterium siraeum, Ruminococcus flavefaciens (such as Rfx XPD3002), or Ruminococcus albus. In certain embodiments, Cas13d is CasRx. In certain embodiments, Cas13d has the amino acid sequence of SEQ ID NO: 101.

[0179] In certain embodiments, the Cas13d is any one of Cas13d disclosed in WO2020/028555 (incorporated herein by reference).

[0180] In some embodiments, the Cas13 protein is a Cas13e protein. In some embodiments, the Cas13e protein is from a species of the genus Planctomycetes. In certain embodiments, the Cas13e protein has an amino acid sequence of SEQ ID NO: 4, 50 or 51. The direct repeat (DR) sequences for the Cas13e of SEQ ID NOs: 50 and 51 are SEQ ID NOs: 57 and 58, respectively.

[0181] In some embodiments, the Cas13 protein is a Cas13f protein. In certain embodiments, the Cas13f protein has an amino acid sequence of any one of SEQ ID NOs: 52-56. The direct repeat (DR) sequences for the Cas13f of SEQ ID NOs: 52-56 are SEQ ID NOs: 59-63, respectively.

[0182] As used herein, “direct repeat sequence” may refer to the DNA coding sequence in the CRISPR locus, or to the RNA encoded by the same in crRNA. Thus when any of SEQ ID NOs: 57-63 is referred to in the context of an RNA molecule, such as crRNA, each T is understood to represent a U.

[0183] In certain embodiments, the wild-type Cas effector proteins of the invention can be: (i) any one of SEQ ID NOs: 50-56, such as SEQ ID NO: 50; (ii) an ortholog, paralog, homolog of any one of SEQ ID NOs: 50-56; or (iii) a Class 2 type VI effector enzyme having amino acid sequence identity of at least about 80%, 85%, 90%, 91%, 92%, 93%, 94%, 95%, 96%, 97%, 98%, or 99% compared to any one of SEQ ID NOs: 50-56.

[0184] In certain embodiments, the Cas13e and Cas13f effector proteins, orthologs, homologs, derivatives and functional fragments thereof are naturally existing. In certain other embodiments, the Cas13e and Cas13f effector proteins, orthologs, homologs, derivatives and functional fragments thereof are not naturally existing, e.g., having at least one amino acid difference compared to a naturally existing sequence.

[0185] In certain embodiments, the region spatially close to the endonuclease catalytic domain of the corresponding wild-type Cas13 effector enzyme includes residues within 120, 110, 100, 90, 80, 70, 60, 50, 40, 30, 20, or 10 amino acids from any residues of the endonuclease catalytic domain (e.g., an RXXXXH domain) in the primary sequence of the Cas13.

[0186] In certain embodiments, the region includes residues within 130, 125, 120, 110, 100, 90, 80, 70, 60, 50, 40, 30, 20, or 10 amino acids from any residues of the endonuclease catalytic domain (e.g., an RXXXXH domain) in the primary sequence of the Cas13e; residues within 170, 160, 150, 140, 130, 120, 110, 100, 90, 80, 70, 60, 50, 40, 30, 20, or 10 amino acids from any residues of the endonuclease catalytic domain (e.g., an RXXXXH domain) in the primary sequence of the Cas13d; or residues within 140, 130, 120, 110, 100, 90, 80, 70, 60, 50, 40, 30, 20, or 10 amino acids from any residues of the endonuclease catalytic domain (e.g., an RXXXXH domain) in the primary sequence of the Cas13f.

[0187] In certain embodiments, the region spatially close to the endonuclease catalytic domain of the corresponding wild-type Cas13 effector enzyme includes residues more than 100, 110, 120, or 130 residues away from any residues of the endonuclease catalytic domain in the primary sequence of the Cas13, but are spatially within 1-10 or 5 ångström of a residue of the endonuclease catalytic domain.

[0188] In certain embodiments, the endonuclease catalytic domain is a HEPN domain, optionally a HEPN domain comprising an RXXXXH motif.

[0189] In certain embodiments, the RXXXXH motif comprises a R{N/H/K/Q/R}X₁X₂X₃H sequence (SEQ ID NO: 1024).

[0190] In certain embodiments, in the R{N/H/K/Q/R}X₁X₂X₃H sequence (SEQ ID NO: 1025), X₁ is R, S, D, E, Q, N, G, or Y; X₂ is I, S, T, V, or L; and X₃ is L, F, N, Y, V, I, S, D, E, or A.

[0191] In certain embodiments, the RXXXXH motif is an N-terminal RXXXXH motif comprising an RNXXXH sequence, such as an RN{Y/F}{F/Y}SH sequence (SEQ ID NO: 64). In certain embodiments, the N-terminal RXXXXH motif has a RNYFSH sequence (SEQ ID NO: 65). In certain embodiments, the N-terminal RXXXXH motif has a RNFYSH sequence (SEQ ID NO: 66). In certain embodiments, the RXXXXH motif is a C-terminal RXXXXH motif comprising an R{N/A/R}{A/K/S/F}{A/L/F}{F/H/L}H sequence (SEQ ID NO: 1026). For example, the C-terminal RXXXXH motif may have a RN(A/K)ALH sequence (SEQ ID NO: 67), or a RAFFHH (SEQ ID NO: 68) or RRAFFH sequence (SEQ ID NO: 69).

[0192] In certain embodiments, region comprises, consists essentially of, or consists of: (a) residues corresponding to residues between residues 1-194, 2-187, 227-242, 620-775, or 634-755 of SEQ ID NO: 4. In certain embodiments, region comprises, consists essentially of, or consists of residues corresponding to residues between residues 35-51, 52-67, 156-171, 666-682, or 712-727 of SEQ ID NO: 4; (ii) residues corresponding to the HEPN1-1 domain (e.g., residues 90-292), Helical2 domain (e.g., residues 536-690), and the HEPN2 domain (e.g., residues 690-967) of SEQ ID NO: 101; or (iii) residues corresponding to the HEPN1 domain (e.g., residues 1-168), Helical1 domain, Helical2 domain (e.g., residues 346-477), and the HEPN2 domain (e.g., residues 644-790) of SEQ ID NO: 52.

[0193] In certain embodiments, the mutation comprises, consists essentially of, or consists of substitutions, within a stretch of 15-20 consecutive amino acids within the region, one or more charged or polar residues to a charge neutral short chain aliphatic residue (such as A). For example, in some embodiments, the stretch is about 16 or 17 residues.

[0194] In certain embodiments, the mutation comprises, consists essentially of, or consists of substitutions, within a stretch of 15-20 consecutive amino acids within the region, (a) one or more charged, nitrogen-containing side chain group, bulky (such as F or Y), aliphatic, and/or polar residues to a charge-neutral short chain aliphatic residue (such as A, V, or I); (b) one or more I/L to A substitution(s); and/or (c) one or more A to V substitution(s).

[0195] In certain embodiments, substantially all, except for up to 1, 2, or 3, charged and polar residues within the stretch are substituted.

[0196] In certain embodiments, a total of about 7, 8, 9, or 10 charged and polar residues within the stretch are substituted.

[0197] In certain embodiments, the N- and C-terminal 2 residues of the stretch are substituted to amino acids the coding sequences of which contain a restriction enzyme recognition sequence. For example, in some embodiments, the N-terminal two residues may be VF, and the C-terminal 2 residues may be ED, and the restriction enzyme is BpiI. Other suitable RE sites are readily envisioned. The RE sites for the N- and C-terminal ends can be, but need not be identical.

[0198] In certain embodiments, the one or more charged or polar residues comprise N, Q, R, K, H, D, E, Y, S, and T residues. In certain embodiments, the one or more charged or polar residues comprise R, K, H, N, Y, and/or Q residues.

[0199] In certain embodiments, one or more Y residue(s) within said stretch is substituted. In certain embodiments, said one or more Y residues(s) correspond to Y672, Y676, and/or Y715 of wild-type Cas13e.1 (SEQ ID NO: 4). In certain embodiments, said stretch is residues 35-51, 52-67, 156-171, 666-682, or 712-727 of SEQ ID NO: 4.

[0200] In certain embodiments, the mutation leads to reduction or elimination of guide sequence-independent collateral RNase activity. In certain embodiments, the mutation comprises charge-neutral short chain aliphatic residue substitution(s) corresponding to any one or more of SEQ ID NOs: 37-39, 45, and 48.

[0201] In certain embodiments, the mutation leads to enhanced guide sequence-independent collateral RNase activity compared to the wild-type Cas13. In certain embodiments, the mutation comprises charge-neutral short chain aliphatic residue substitution(s) corresponding to any one or more of SEQ ID NOs: 40-42.

[0202] In certain embodiments, the charge-neutral short chain aliphatic residue is A, I, L, V, or G.

[0203] In certain embodiments, the charge-neutral short chain aliphatic residue is Ala (A).

[0204] In certain embodiments, the mutation comprises, consists essentially of, or consists of substitutions within 2, 3, 4, or 5 said stretches of 15-20 consecutive amino acids within the region.

[0205] In certain embodiments, the mutation with reduced collateral activity comprises, consists essentially of, or consists of: (a) substitutions within 1, 2, 3, 4, or 5 of said stretches of 15-20 consecutive amino acids within the region; (b) a mutation corresponds to a Cas13d mutation (e.g., that of Example 4) that retains at least about 75% of guide RNA-specific cleavage of wild-type Cas13d (such as SEQ ID NO: 101) (or theoretical maximum thereof), and exhibits less than about 25% or 27.5% collateral effect of wild-type Cas13d (such as SEQ ID NO: 101) (or theoretical maximum thereof); (c) a mutation corresponds to the N1V7, N2V7, N2V8 (cfCas13d), N3V7, or N15V4 mutation of Cas13d mutation; (d) a mutation corresponds to a Cas13d mutation (e.g., that of Example 4) that retains between about 25-75% of guide RNA-specific cleavage of wild-type Cas13d (such as SEQ ID NO: 101) (or theoretical maximum thereof), and exhibits less than about 25% or 27.5% collateral effect of wild-type Cas13d (such as SEQ ID NO: 101) (or theoretical maximum thereof); (e) a mutation corresponds to the N2V4, N2V5, N4V3, N6V3, N10V6, N15V2, N20V6, or N20-Y910A mutation of Cas13d mutation; (f) a mutation corresponds to a Cas13e mutation (e.g., that of Example 1, 2, or 5) that retains at least about 75% of guide RNA-specific cleavage of wild-type Cas13e (such as SEQ ID NO: 4) (or theoretical maximum thereof), and exhibits less than about 25% collateral effect of wild-type Cas13e (such as SEQ ID NO: 4) (or theoretical maximum thereof); (g) a mutation corresponds to the M1V4, M2V2, M2V3, M2V4, M5V1, M6V2, M6V3, M6V4, M7V1, M7V2, M7V3, M7-Y55A, M7-Y61A, M11V1, M12V3, M15V1, M15V2, M15-Y643A, M15-Y647A, M16V1, M16V2, M17V2, M18V2, M18V3, M19V2, M19V3, or M19-IA mutation of Cas13e mutation; (h) a mutation corresponds to a Cas13e mutation (e.g., that of Example 5) that retains between about 25-75% of guide RNA-specific cleavage of wild-type Cas13e (such as SEQ ID NO: 4) (or theoretical maximum thereof), and exhibits less than about 25% collateral effect of wild-type Cas13e (such as SEQ ID NO: 4) (or theoretical maximum thereof); and/or (i) a mutation corresponds to the M17YY (cfCas13e), M8V4, M9V1, M11V2, M11V3, M13V1, M13V2, M13V3, M15V3, or M20V2 mutation of Cas13e mutation; (j) a mutation corresponds to a Cas13f mutation (e.g., that of Example 12) that retains at least about 75% of guide RNA-specific cleavage of wild-type Cas13f (such as SEQ ID NO: 52) (or theoretical maximum thereof), and exhibits less than about 25 or 27.5% collateral effect of wild-type Cas13f (such as SEQ ID NO: 52) (or theoretical maximum thereof); (k) a mutation corresponds to the F7V2, F10V1, F10V4, F40V2, F40V4, F44V2, F10S19, F10S21, F10S24, F10S26, F10S27, F10S33, F10S34, F10S35, F10S36, F10S45, F10S46, F10S48, F10S49, F40S22, F40S23, F40S26, F40S27, OR F40S36 mutation of Cas13f mutation; (1) a mutation corresponds to a Cas13f mutation (e.g., that of Example 12) that retains between about 50-75% of guide RNA-specific cleavage of wild-type Cas13f (such as SEQ ID NO: 52) (or theoretical maximum thereof), and exhibits less than about 25 or 27.5% collateral effect of wild-type Cas13f (such as SEQ ID NO: 52) (or theoretical maximum thereof); and/or (m) a mutation corresponds to the F2V4, F3V1, F3V3, F3V4, F5V2, F5V3, F6V4, F7V1, F38V4, F40V1, F41V1, F41V3, F42V4, F43V1, F10S2, F10S11, F10S12, F10S18, F10S20, F10S23, F10S25, F10S28, F10S43, F10S44, F10S47, F10S50, F10S51, F10S52, F40S7, F40S9, F40S11, F40S21, F40S22, F40S24, F40S28, F40S29, F40S30, F40S35, OR F40S37 mutation of Cas13f mutation.

[0206] In certain embodiments, the mutation with enhanced collateral activity comprises, consists essentially of, or consists of: (a) substitutions within 1, 2, 3, 4, or 5 of said stretches of 15-20 consecutive amino acids within the region; (b) a mutation corresponds to a Cas13d mutation (e.g., that of Example 4) that retains at least about 75% of guide RNA-specific cleavage of wild-type Cas13d (such as SEQ ID NO: 101) (or theoretical maximum thereof), and exhibits more than about 110%, 115%, 120%, 125%, 130%, 135%, 140%, 145%, 150%, 155%, 160%, 165%, 170%, 175%, 180% or more collateral effect of wild-type Cas13d (such as SEQ ID NO: 101); (c) a mutation corresponds to the N2-Y142A, N4-Y193A, N12-Y604A, N21V7 mutation of Cas13d mutation in Example 4; (d) a mutation corresponds to a Cas13e mutation (e.g., that of Example 5) that retains at least about 75% of guide RNA-specific cleavage of wild-type Cas13e (such as SEQ ID NO: 4) (or theoretical maximum thereof), and exhibits more than about 110%, 115%, 120%, 125%, 130%, 135%, 140%, 145%, 150%, 155%, 160%, 165%, 170%, 175%, 180% or more collateral effect of wild-type Cas13e (such as SEQ ID NO: 4); (e) a mutation corresponds to the M4V2, M4V3, M4V4, M8V1, M8V2, M9V2, M9V3, M10V1, M10V2, M11V4, M12V2, M14V1, M14V2, M16V3, M18V1, M19-G712A, M19-C727A, M19T725A, or M21V2 mutation of Cas13e mutation; (1) a mutation corresponds to a Cas13f mutation (e.g., that of Example 12) that retains at least about 75% of guide RNA-specific cleavage of wild-type Cas13f (such as SEQ ID NO: 52) (or theoretical maximum thereof), and exhibits more than about 110%, 115%, 120%, 125%, 130%, 135%, 140%, 145%, 150%, 155%, 160%, 165%, 170%, 175%, 180% or more collateral effect of wild-type Cas13f (such as SEQ ID NO: 52); (g) a mutation corresponds to the F38V2, F42V1, F46V3, F38S2, F38S4, F3855, F38S6, F38S7, F38S8, F38S9, F38S10, F38S11, F38S12, F38S13, F38S15, F38S16, F38S17, F40S1, F40S2, F40S3, F40S4, F40S5, F40S6, F40S8, F40S16, F40S18, F46S1, F46S4, F46S6, F46S7, F46S10, F46S14, F46S15, F10S4, F10S5, F10S6, F10S9, F10S10, F10S7, F38S1, F38S13, or F46S2 mutation of Cas13f mutation (e.g., that of Example 12).

[0207] The sequences of the mutations and/or variants referenced herein for Cas13d, Cas13e, and Cas13f are described in detail in the examples (such as examples 1, 2, 4, 5, and 12) and the associated sequence listing.

[0208] In certain embodiments, more than one (e.g., any combinations of two or more of) such mutations/variants may be present in the same engineered Cas13 effector enzyme.

[0209] In certain embodiments, the engineered Cas13 preserves at least about 50%, 60%, 70%, 72.5%, 75%, 80%, 85%, 87.5%, 90%, 95%, 96%, 97%, 97.5%, 98%, or 99% of the guide sequence-specific endonuclease cleavage activity of the wild-type Cas13 (or theoretical maximum thereof) towards the target RNA.

[0210] In certain embodiments, the engineered Cas13 has at least about 95%, 100%, 105%, 110%, 115%, 120%, 125%, 130%, 135%, 140%, 145%, 150%, 155%, 160% or more of the guide sequence-specific endonuclease cleavage activity of the wild-type Cas13 towards the target RNA. That is, the subject engineered Cas13 variant may have higher guide sequence-specific endonuclease cleavage activity towards the target RNA compared to the wild-type Cas13 from which the variant is derived.

[0211] In certain embodiments, the engineered Cas13 lacks at least about 70%, 72.5%, 75%, 77.5%, 80%, 82.5%, 85%, 87.5%, 90%, 92.5%, 95%, 96%, 97%, 98%, 99%, or 100% of the guide sequence-independent collateral endonuclease cleavage activity of the wild-type Cas13 (or theoretical maximum thereof) towards the non-target RNA.

[0212] In certain embodiments, the engineered Cas13 preserves at least about 80-90% of the guide sequence-specific endonuclease cleavage activity of the wild-type Cas13 (or theoretical maximum thereof) towards the target RNA, and lacks at least about 95-100% of the guide sequence-independent collateral endonuclease cleavage activity of the wild-type Cas13 (or theoretical maximum thereof) towards the non-target RNA.

[0213] In certain embodiments, the guide RNA-specific and collateral (gRNA-independent) cleavage activity by the engineered Cas13 effector enzymes are measured using methods substantially as described in any of the examples (such as Examples 1, 2, 4, 5 and 12).

[0214] In certain embodiments, the engineered Cas13 of the invention has an amino acid sequence at least 80%, 85%, 90%, 95%, 96%, 97%, 98%, 99%, 99.1%, 99.2%, 99.3%, 99.4%, 99.5%, 99.6%, 99.7%, 99.8%, or 99.86% identical to any one of SEQ ID NOs: 6-10, and Cas13d (such as SEQ ID NO: 101), excluding any one or more of the regions defined by SEQ ID NOs: 16, 20, 24, 28, and 32, and any of the mutation regions in Example 4 or 5. For example, in the regions outside or excluding SEQ ID NOs: 16, 20, 24, 28, and/or 32, the engineered Cas13 of the invention may differ from the engineered Cas13 of any one of SEQ ID NOs: 6-10 by 1, 2, 3, 4, 5, 6, 7, 8, 9, 10, or more residues, provided that such additional changes do not substantially negatively affect the guide sequence-specific endonuclease activity, and/or do not increase the guide sequence-independent collateral effect.

[0215] In certain embodiments, the amino acid sequence contains up to 1, 2, 3, 4, or 5 differences in each of one or more regions defined by SEQ ID NO: 16, 20, 24, 28, and 32, as compared to SEQ ID NOs: 17, 21, 25, 29, and 33, respectively. For example, additional changes in SEQ ID NOs: 17, 21, 25, 29, and/or 33 are possible without substantially negatively affect the guide sequence-specific endonuclease activity, and/or do not increase the guide sequence-independent collateral effect.

[0216] In certain embodiments, the engineered Cas13 of the invention has the amino acid sequence of any one of SEQ ID NOs: 6-10. In certain embodiments, the engineered Cas13 of the invention has the amino acid sequence of SEQ ID NO: 9 or 10.

[0217] In certain embodiments, the engineered Cas13 of the invention further comprises a nuclear localization signal (NLS) sequence or a nuclear export signal (NES). For example, in certain embodiments, the engineered Cas13 may comprise an N- and/or a C-terminal NLS.

[0218] In a related aspect, the invention provides additional derivatives of the subject engineered Cas13, such as those either substantially lacking or having enhanced collateral endonuclease activity, such as Cas13e and Cas13f effector proteins based on any one of SEQ ID NOs: 50-56 (e.g., SEQ ID NOs: 6-10), or the above orthologs, homologs, derivatives and functional fragments thereof, which comprises another covalently or non-covalently linked protein or polypeptide or other molecules (such as detection reagents or drug/chemical moieties). Such other proteins/polypeptides/other molecules can be linked through, for example, chemical coupling, gene fusion, or other non-covalent linkage (such as biotin-streptavidin binding). Such derived proteins do not affect the function of the original protein, such as the ability to bind a guide RNA/crRNA of the invention (described herein below) to form a complex, the RNase activity, and the ability to bind to and cleave a target RNA at a specific site, under the guidance of the crRNA that is at least partially complementary to the target RNA. In addition, such derived proteins do retain the characteristics of the subject engineered Cas13 either lacking or having enhanced collateral endonuclease activity.

[0219] That is, in certain embodiments, upon binding of the RNP complex of the subject engineered Cas13 (or derivative thereof) to the target RNA, the engineered Cas13 either does not exhibit substantial (or detectable) or has enhanced collateral RNase activity.

[0220] Such derivation may be used, for example, to add a nuclear localization signal (NLS, such as SV40 large T antigen NLS) to enhance the ability of the subject Cas13, e.g., Cas13e and Cas13f effector proteins, to enter cell nucleus. Such derivation can also be used to add a targeting molecule or moiety to direct the subject Cas13, e.g., Cas13e and Cas13f effector proteins, to specific cellular or subcellular locations. Such derivation can also be used to add a detectable label to facilitate the detection, monitoring, or purification of the subject Cas13, e.g., Cas13e and Cas13f effector proteins. Such derivation can further be used to add a deamination enzyme moiety (such as one with adenine or cytosine deamination activity) to facilitate RNA base editing.

[0221] The derivation can be through adding any of the additional moieties at the N- or C-terminal of the subject Cas13 effector proteins, or internally (e.g., internal fusion or linkage through side chains of internal amino acids).

[0222] In a related aspect, the invention provides conjugates of the subject engineered Cas13, such as those either substantially lacking or having enhanced substantially lacking collateral endonuclease activity, such as Cas13e and Cas13f effector proteins based on any one of SEQ ID NOs: 50-56 (e.g., SEQ ID NOs: 6-10), or the above orthologs, homologs, derivatives and functional fragments thereof, which are conjugated with moieties such as other proteins or polypeptides, detectable labels, or combinations thereof. Such conjugated moieties may include, without limitation, localization signals, reporter genes (e.g., GST, HRP, CAT, GFP, HcRed, DsRed, CFP, YFP, BFP), labels (e.g., fluorescent dye such as FITC, or DAPI), NLS, targeting moieties, DNA binding domains (e.g., MBP, Lex A DBD, Gal4 DBD), epitope tags (e.g., His, myc, V5, FLAG, HA, VSV-G, Trx, etc), transcription activation domains (e.g., VP64 or VPR), transcription inhibition domains (e.g., KRAB moiety or SID moiety), nucleases (e.g., FokI), deamination domain (e.g., ADAR1, ADAR2, APOBEC, AID, or TAD), methylase, demethylase, transcription release factor, HDAC, ssRNA cleavage activity, dsRNA cleavage activity, ssDNA cleavage activity, dsDNA cleavage activity, DNA or RNA ligase, any combination thereof, etc.

[0223] For example, the conjugate may include one or more NLSs, which can be located at or near N-terminal, C-terminal, internally, or combination thereof. The linkage can be through amino acids (such as D or E, or S or T), amino acid derivatives (such as Ahx, β-Ala, GABA or Ava), or PEG linkage.

[0224] In certain embodiments, conjugations do not affect the function of the original engineered protein, such as those either substantially lacking or having enhanced collateral effect, such as the ability to bind a guide RNA/crRNA of the invention (described herein below) to form a complex, and the ability to bind to and cleave a target RNA at a specific site, under the guidance of the crRNA that is at least partially complementary to the target RNA.

[0225] In a related aspect, the invention provides fusions of the subject engineered Cas13, such as those either substantially lacking or having enhanced collateral endonuclease activity, such as Cas13e and Cas13f effector proteins based on any one of SEQ ID NOs: 50-56 (e.g., SEQ ID NOs: 6-10), or the above orthologs, homologs, derivatives and functional fragments thereof, which fusions are with moieties such as localization signals, reporter genes (e.g., GST, HRP, CAT, GFP, HcRed, DsRed, CFP, YFP, BFP), NLS, protein targeting moieties, DNA binding domains (e.g., MBP, Lex A DBD, Gal4 DBD), epitope tags (e.g., His, myc, V5, FLAG, HA, VSV-G, Trx, etc), transcription activation domains (e.g., VP64 or VPR), transcription inhibition domains (e.g., KRAB moiety or SID moiety), nucleases (e.g., FokI), deamination domain (e.g., ADAR1, ADAR2, APOBEC, AID, or TAD), methylase, demethylase, transcription release factor, HDAC, ssRNA cleavage activity, dsRNA cleavage activity, ssDNA cleavage activity, dsDNA cleavage activity, DNA or RNA ligase, any combination thereof, etc.

[0226] For example, the fusion may include one or more NLSs, which can be located at or near N-terminal, C-terminal, internally, or combination thereof. In certain embodiments, conjugations do not affect the function of the original engineered Cas13 protein, such as those either substantially lacking or having enhanced collateral activity, such as the ability to bind a guide RNA/crRNA of the invention (described herein below) to form a complex, the RNase activity, and the ability to bind to and cleave a target RNA at a specific site, under the guidance of the crRNA that is at least partially complementary to the target RNA.

[0227] In another aspect, the invention provides a polynucleotide encoding the engineered Cas13 of the invention. The polynucleotide may comprise: (i) a polynucleotide encoding any one of the engineered Cas13, such as those either substantially lacking or having enhanced collateral effect, e.g., those based on Cas13e or Cas13f effector proteins of SEQ ID NOs: 50-56 (such as SEQ ID NOs: 6-10), or orthologs, homologs, derivatives, functional fragments, fusions thereof; (ii) a polynucleotide of any one of SEQ ID NOs: 11-15; or (iii) a polynucleotide comprising (i) and (ii).

[0228] In certain embodiments, the polynucleotide of the invention is codon-optimized for expression in a eukaryote, a mammal (such as a human or a non-human mammal), a plant, an insect, a bird, a reptile, a rodent (e.g., mouse, rat), a fish, a worm/nematode, or a yeast.

[0229] In a related aspect, the invention provides a polynucleotide having (i) one or more (e.g., 1, 2, 3, 4, 5, 6, 7, 8, 9 or 10) nucleotides additions, deletions, or substitutions compared to the subject polynucleotide described above; (ii) at least 50%, 60%, 70%, 80%, 90%, 95%, or 97% sequence identity to the subject polynucleotide described above; (iii) hybridize under stringent conditions with the subject polynucleotide described above or any of (i) and (ii); or (iv) is a complement of any of (i)-(iii).

[0230] In another related aspect, the invention provides a vector comprising or encompassing any one of the polynucleotides of the invention described herein. The vector can be a cloning vector, or an expression vector. The vector can be a plasmid, phagemid, or cosmid, just to name a few. In certain embodiments, the vector can be used to express the polynucleotide in a mammalian cell, such as a human cell, any one of the engineered Cas13, such as those either substantially lacking or having enhanced collateral activity, e.g., the subject engineered Cas13e or Cas13f effector proteins based on SEQ ID NOs: 50-56 (such as SEQ ID NOs: 6-10), or orthologs, homologs, derivatives, functional fragments, fusions thereof; or any of the polynucleotide of the invention; or any of the complex of the invention.

[0231] In certain embodiments, the polynucleotide is operably linked to a promoter and optionally an enhancer. For example, in some embodiments, the promoter is a constitutive promoter, an inducible promoter, a ubiquitous promoter, or a tissue specific promoter. In certain embodiments, the vector is a plasmid. In certain embodiments, the vector is a retroviral vector, a phage vector, an adenoviral vector, a herpes simplex viral (HSV) vector, an AAV vector, or a lentiviral vector. In certain embodiments, the AAV vector is a recombinant AAV vector of the serotype AAV1, AAV2, AAV4, AAV5, AAV6, AAV7, AAVrh74, AAV8, AAV9, AAV10, AAV 11, AAV 12, or AAV 13. In certain embodiments.

[0232] Another aspect of the invention provides a delivery system comprising (1) a delivery vehicle, and (2) the engineered Cas13 of the invention, the polynucleotide of the invention, or the vector of the invention.

[0233] In certain embodiments, the delivery vehicle is a nanoparticle, a liposome, an exosome, a microvesicle, or a gene-gun.

[0234] A further aspect of the invention provides a cell or a progeny thereof, comprising the engineered Cas13 of the invention, the polynucleotide of the invention, or the vector of the invention. The cell can be a prokaryote such as E. coli, or a cell from a eukaryote such as yeast, insect, plant, animal (e.g., mammal including human and mouse). The cell can be isolated primary cell (such as bone marrow cells for ex vivo therapy), or established cell lines such as tumor cell lines, 293T cells, or stem cells, iPCs, etc.

[0235] In certain embodiments, the cell or progeny thereof is a eukaryotic cell (e.g., a non-human mammalian cell, a human cell, or a plant cell) or a prokaryotic cell (e.g., a bacteria cell).

[0236] A further aspect of the invention provides a non-human multicellular eukaryote comprising the cell of the invention.

[0237] In certain embodiments, the non-human multicellular eukaryote is an animal (e.g., rodent or primate) model for a human genetic disorder.

[0238] In another aspect, the invention provides a complex comprising: (i) a protein composition of any one of the subject engineered Cas13, such as those either substantially lacking or having enhanced collateral endonuclease activity, e.g., engineered Cas13e or Cas13f effector protein, or orthologs, homologs, derivatives, conjugates, functional fragments thereof, conjugates thereof, or fusions thereof; and (ii) a polynucleotide composition, comprising an isolated polynucleotide comprising a cognate DR sequence for said engineered Cas13 effector enzyme, and a spacer/guide sequence complementary to at least a portion of a target RNA.

[0239] In certain embodiments, the DR sequence is at the 3′ end of the spacer sequence.

[0240] In certain embodiments, the DR sequence is at the 5′ end of the spacer sequence.

[0241] In some embodiments, the polynucleotide composition is the guide RNA/crRNA of the subject engineered Cas13, such as those either substantially lacking or having enhanced collateral activity, e.g., engineered Cas13e or Cas13f system, which does not include a tracrRNA.

[0242] In certain embodiments, for use with the subject engineered Cas13, such as those either substantially lacking or having enhanced collateral activity, e.g., the subject engineered Cas13e and Cas13f effector proteins, homologs, orthologs, derivatives, fusions, conjugates, or functional fragments thereof having guide sequence-specific RNase activity, the spacer sequence is at least about 10 nucleotides, or between 10-60, 15-50, 20-50, 25-40, 25-50, or 19-50 nucleotides.

[0243] In a related aspect, the invention provides a eukaryotic cell comprising a subject complex comprising a subject engineered Cas13, said complex comprising: (1) an RNA guide sequence comprising a spacer sequence capable of hybridizing to a target RNA, and a direct repeat (DR) sequence 5′ or 3′ to the spacer sequence; and, (2) a subject engineered Cas13, such as those either substantially lacking or having enhanced collateral activity, such as a subject engineered Cas13e or Cas13f effector enzyme based on a wild-type having an amino acid sequence of any one of SEQ ID NOs: 50-56 (such as SEQ ID NOs: 6-10), or a derivative or functional fragment of said Cas; wherein the Cas, the derivative, and the functional fragment of said Cas, are capable of (i) binding to the RNA guide sequence and (ii) targeting the target RNA.

[0244] In another aspect, the invention provides a composition comprising: (i) a first (protein) composition selected from any one of the engineered Cas13, such as those either substantially lacking or having enhanced collateral activity, e.g., engineered Cas13e or Cas13f effector proteins based on SEQ ID NOs: 50-56 (such as SEQ ID NOs: 6-10), or orthologs, homologs, derivatives, conjugates, functional fragments, fusions thereof; and (ii) a second (nucleotide) composition comprising an RNA encompassing a guide RNA/crRNA, particularly a spacer sequence, or a coding sequence for the same. The guide RNA may comprise a DR sequence, and a spacer sequence which can complement or hybridize with a target RNA. The guide RNA can form a complex with the first (protein) composition of (i). In some embodiment, the DR sequence can be the polynucleotide of the invention. In some embodiment, the DR sequence can be at the 5- or 3′-end of the guide RNA. In some embodiments, the composition (such as (i) and/or (ii)) is non-naturally occurring or modified from a naturally occurring composition. In some embodiments, the target sequence is an RNA from a prokaryote or a eukaryote, such as a non-naturally existing RNA. The target RNA may be present inside a cell, such as in the cytosol or inside an organelle. In some embodiments, the protein composition may have an NLS that can be located at its N- or C-terminal, or internally.

[0245] In another aspect, the invention provides a composition comprising one or more vectors of the invention, said one or more vectors comprise: (i) a first polynucleotide that encodes any one of the engineered Cas13, such as those either substantially lacking or having enhanced collateral activity, such as a subject engineered Cas13e or Cas13f effector proteins based on SEQ ID NOs: 50-56 (such as SEQ ID NOs: 6-10), or orthologs, homologs, derivatives, functional fragments, fusions thereof; optionally operably linked to a first regulatory element; and (ii) a second polynucleotide that encodes a guide RNA of the invention; optionally operably linked to a second regulatory element. The first and the second polynucleotides can be on different vectors, or on the same vector. The guide RNA can form a complex with the protein product encoded by the first polynucleotide, and comprises a DR sequence (such as any one of the 4th aspect) and a spacer sequence that can bind to/complement with a target RNA. In some embodiments, the first regulatory element is a promoter, such as an inducible promoter. In some embodiments, the second regulatory element is a promoter, such as an inducible promoter. In some embodiments, the target sequence is an RNA from a prokaryote or a eukaryote, such as a non-naturally existing RNA. The target RNA may be present inside a cell, such as in the cytosol or inside an organelle. In some embodiments, the protein composition may have an NLS that can be located at its N- or C-terminal, or internally.

[0246] In some embodiments, the vector is a plasmid. In some embodiment, the vector is a viral vector based on a retrovirus, a replication incompetent retrovirus, adenovirus, replication incompetent adenovirus, or AAV. In some embodiments, the vector can self-replicate in a host cell (e.g., having a bacterial replication origin sequence). In some embodiments, the vector can integrate into a host genome and be replicated therewith. In some embodiment, the vector is a cloning vector. In some embodiment, the vector is an expression vector.

[0247] The invention further provides a delivery composition for delivering any of the engineered Cas13, such as those either substantially lacking or having enhanced collateral activity, e.g., a subject engineered Cas13e or Cas13f effector proteins based on SEQ ID NOs: 50-56 (such as SEQ ID NOs: 6-10), or orthologs, homologs, derivatives, conjugates, functional fragments, fusions thereof of the invention; the polynucleotide of the invention; the complex of the invention; the vector of the invention; the cell of the invention, and the composition of the invention. The delivery can be through any one known in the art, such as transfection, lipofection, electroporation, gene gun, microinjection, sonication, calcium phosphate transfection, cation transfection, viral vector delivery, etc., using vehicles such as liposome(s), nanoparticle(s), exosome(s), microvesicle(s), a gene-gun or one or more viral vector(s).

[0248] The invention further provides a kit comprising any one or more of the following: any of the engineered Cas13, such as those either substantially lacking or having enhanced collateral activity, e.g., a subject engineered Cas13e or Cas13f effector proteins based on SEQ ID NOs: 50-56 (such as SEQ ID NOs: 6-10), or orthologs, homologs, derivatives, conjugates, functional fragments, fusions thereof of the invention; the polynucleotide of the invention; the complex of the invention; the vector of the invention; the cell of the invention, and the composition of the invention. In some embodiments, the kit may further comprise an instruction for how to use the kit components, and/or how to obtain additional components from 3^{rd} party for use with the kit components. Any component of the kit can be stored in any suitable container.

[0249] Another aspect of the invention provides an engineered Cas13 effector enzyme comprising any one or more mutations as described in any of the Examples, such as Example 1, 2, 4, 5, or 12.

[0250] In certain embodiments, the engineered Cas13 effector enzyme exhibits about the same or enhanced guide-RNA-mediated cleavage of a target RNA complementary to the guide RNA, as compared to that of the wild-type Cas13 effector enzyme from which the engineered Cas13 effector enzyme derives (or theoretical maximum thereof).

[0251] In certain embodiments, the engineered Cas13 effector enzyme exhibits reduced or diminished guide-RNA independent or collateral cleavage of a non-specific RNA (e.g., one not substantially complementary to the guide RNA), as compared to that of the wild-type Cas13 effector enzyme (or theoretical maximum thereof) from which the engineered Cas13 effector enzyme derives. For example, the engineered Cas13 effector enzyme exhibits about 50%, 40%, 30%, 20%, 15%, 10% or less collateral cleavage compared to that of the wild-type Cas13 effector enzyme (or theoretical maximum thereof) from which the engineered Cas13 effector enzyme derives.

[0252] In certain embodiments, the engineered Cas13 effector enzyme exhibits increased guide-RNA independent or collateral cleavage of a non-specific RNA (e.g., one not substantially complementary to the guide RNA), as compared to that of the wild-type Cas13 effector enzyme from which the engineered Cas13 effector enzyme derives. For example, the engineered Cas13 effector enzyme exhibits about 105%, 110%, 120%, 130%, 140%, 150%, 160%, 170%, 180%, 190%, 200% or more collateral cleavage compared to that of the wild-type Cas13 effector enzyme from which the engineered Cas13 effector enzyme derives.

[0253] With the inventions generally described herein above, more detailed descriptions for the various aspects of the invention are provided in separate sections below. However, it should be understood that, for simplicity and to reduce redundancy, certain embodiments of the invention are only described under one section or only described in the claims or examples. Thus it should also be understood that any one embodiment of the invention, including those described only under one aspect, section, or only in the claims or examples, can be combined with any other embodiment of the invention, unless specifically disclaimed or the combination is improper.

### 2. Representative Engineered Class 2 Type VI Cas and Derivatives Thereof

[0254] One aspect of the invention provides engineered Cas13, such as those either substantially lacking or having enhanced collateral activity.

[0255] In certain embodiments, the Cas13 effector enzyme is a Class 2, type VI effector enzyme having two strictly conserved RX4-6H (RXXXXH)-like motifs, characteristic of Higher Eukaryotes and Prokaryotes Nucleotide-binding (HEPN) domains. In certain embodiments, the CRISPR Class 2, type VI effectors that contain two HEPN domains have been previously characterized and include, for example, CRISPR Cas13a (C2c2), Cas13b, Cas13c, Cas13d (including the engineered variant CasRx), Cas13e, and Cas13f.

[0256] HEPN domains have been shown to be RNase domains and confer the ability to bind to and cleave target RNA molecule. The target RNA may be any suitable form of RNA, including but not limited to mRNA, tRNA, ribosomal RNA, non-coding RNA, lncRNA (long non-coding RNA), and nuclear RNA. For example, in some embodiments, the engineered Cas13 proteins recognize and cleave RNA targets located on the coding strand of open reading frames (ORFs).

[0257] In one embodiment, the Class 2 type VI Cas13 effector enzyme is of the subtype Type VI-E and VI-F, or Cas13e or Cas13f (such as SEQ ID NOs: 50-56). Direct comparison of the wild-type Type VI-E and VI-F CRISPR-Cas effector proteins with the effector of these other systems shows that Type VI-E and VI-F CRISPR-Cas effector proteins are significantly smaller (e.g., about 20% fewer amino acids) than even the smallest previously identified Type VI-D/Cas13d effectors (see FIG. 15), and have less than 30% sequence similarity in one to one sequence alignments to other previously described effector proteins, including the phylogenetically closest relatives Cas13b.

[0258] Class 2, subtypes VI-E and VI-F effectors, like other Cas13 proteins, can be used in a variety of applications, and are particularly suitable for therapeutic applications since they are significantly smaller than other effectors (e.g., CRISPR Cas13a, Cas13b, Cas13c, and Cas13d/CasRx effectors) which allows for the packaging of the nucleic acids encoding the effectors and their guide RNA coding sequences into delivery systems having size limitations, such as the AAV vectors. Further, the lack of detectable collateral/non-specific RNase activity of the subject engineered Cas13, upon activation of the guide sequence-specific RNase activity, makes these engineered Cas13 effectors less prong to (if not immune from) potentially dangerous generalized off-target RNA digestion in target cells that are desirably not destroyed.

[0259] Exemplary Type VI-D CRISPR-Cas effector proteins include Cas13d, such as SEQ ID NO: 101. Exemplary Type VI-E and VI-F CRISPR-Cas effector proteins are provided in the table below.

| | |
|---|---|
| Cas13e.l | MAQVSKQTSKKRELSIDEYQGARKWCFTIAFNKALVNRDKNDGLFVESLLRHEKYSKHDWY |
| | DEDTRALIKCSTOAANAKAEALRNYFSHYRHSPGCLTFTAEDELRTIMERAYERAIFECRR |
| | RETEVIIEFPSLFEGDRITTAGVVFFVSFFVERRVLDRLYGAVSGLKKNEGQYKLTRKALS |
| | MYCLKDSRFTKAWDKRVLLFRDILAQLGRIPAEAYEYYHGEQGDKKRANDNEGTNPKRHKD |
| | KFIEFALHYLEAQHSEICFGRRHIVREEAGAGDEHKKHRTKGKVVVDFSKKDEDQSYYISK |
| | NNVIVRIDKNAGPRSYRMGLNELKYLVLLSLQGKGDDAIAKLYRYRQHVENILDVVKVTDK |
| | DNHVFLPRFVLEQHGIGRKAFKQRIDGRVKHVRGVWEKKKAATNEMTLHEKARDILQYVNE |
| | NCTRSFNPGEYNRLLVCLVGKDVENFQAGLKRLQLAERIDGRVYSIFAQTSTINEMHQVVC |
| | DQILNRLCRIGDQKLYDYVGLGKKDEIDYKQKVAWFKEHISIRRGFLRKKFWYDSKKGFAK |
| | LVEEHLESGGGQRDVGLDKKYYHIDAIGRFEGANPALYETLARDRLCLMMAQYFLGSVRKE |
| | LGNKIVWSNDSIELPVEGSVGNEKSIVFSVSDYGKLYVLDDAEFLGRICEYFMPHEKGKIR |
| | YHTVYEKGFRAYNDLQKKCVEAVLAFEEKVVKAKKMSEKEGAHYIDFREILAQTMCKEAEK |
| | TAVNKVRRAFFHHHLKFVIDEFGLFSDVMKKYGIEKEWKFPVK* (SEQ ID NO: 50) |
| Cas13e.2 | MKVENIKEKSKKAMYLINHYEGPKKWCFAIVLNRACDNYEDNPHLFSKSLLEFEKTSRKDW |
| | FDEETRELVEQADTEIQPNPNLKPNTTANRKLKDIRNYFSHHYHKNECLYFKNDDPIRCIM |
| | EAAYEKSKIYIKGKQIEQSDIPLPELFESSGWITPAGILLLASFFVERGILHRLMGNIGGF |
| | KDNRGEYGLTHDIFTTYCLKGSYSIRAQDHDAVMFRDILGYLSRVPTESFQRIKQPQIRKE |
| | GQLSERKTDKFITFALNYLEDYGLKDLEGCKACFARSKIVREQENVESINDKEYKPHENKK |
| | KVEIHFDQSKEDRFYINRNNVILKIQKKDGHSNIVRMGVYELKYLVLMSLVGKAKEAVEKI |
| | DNYIQDLRDQLPYIEGKNKEEIKEYVRFFPRFIRSHLGLLQINDEEKIKARLDYVKTKWLD |
| | KKEKSKELELHKKGRDILRYINERCDRELNRNVYNRILELLVSKDLTGFYRELEELKRTRR |
| | IDKNIVQNLSGQKTINALHEKVCDLVLKEIESLDTENLRKYLGLIPKEEKEVTFKEKVDRI |
| | LKQPVIYKGFLRYQFFKDDKKSFVLLVEDALKEKGGGCDVPLGKEYYKIVSLDKYDKENKT |
| | LCETLAMDRLCLMMARQYYLSLNAKLAQEAQQIEWKKEDSIELIIFTLKNPDQSKQSFSIR |
| | FSVRDFTKLYVTDDPEFLARLCSYFFPVEKEIEYHKLYSEGINKYTNLQKEGIEAILELEK |
| | KLIERNRIQSAKNYLSFNEIMNKSGYNKDEQDDLKKVRNSLLHYKLIFEKEHLKKFYEVMR |
| | GEGIEKKWSLIV* (SEQ ID NO: 51) |
| Cas13f.l | MNGIELKKEEAAFYFNQAELNLKAIEDNIFDKERRKTLLNNPQILAKMENFIFNFRDVTKN |
| | AKGEIDCLLLKLRELRNFYSHYVHKRDVRELSKGEKPILEKYYQFAIESTGSENVKLEIIE |
| | NDAWLADAGVLFFLCIFLKKSQANKLISGISGFKRNDDTGQPRRNLFTYFSIREGYKVVPE |
| | MQKHFLLFSLVNHLSNQDDYIEKAHQPYDIGEGLFFHRIASTFLNISGILRNMKFYTYQSK |
| | RLVEQRGELKREKDIFAWEEPFQGNSYFEINGHKGVIGEDELKELCYAFLIGNQDANKVEG |
| | RITQFLEKFRNANSVQQVKDDEMLKPEYFPANYFAESGVGRIKDRVLNRLNKAIKSNKAKK |
| | GEIIAYDKMREVMAFINNSLPVDEKLKPKDYKRYLGMVRFWDREKDNIKREFETKEWSKYL |
| | PSNFWTAKNLERVYGLAREKNAELFNKLKADVEKMDERELEKYQKINDAKDLANLRRLASD |
| | FGVKWEEKDWDEYSGQIKKQITDSQKLTIMKQRITAGLKKKHGIENLNLRITIDINKSRKA |
| | VLNRIAIPRGFVKRHILGWQESEKVSKKIREAECEILLSKEYEELSKQFFQSKDYDKMTRI |
| | NGLYEKNKLIALMAVYLMGQLRILFKEHTKLDDITKTTVDFKISDKVTVKIPFSNYPSLVY |
| | TMSSKYVDNIGNYGFSNKDKDKPILGKIDVIEKQRMEFIKEVLGFEKYLFDDKIIDKSKFA |
| | DTATHISFAEIVEELVEKGWDKDRLTKLKDARNKALHGEILTGTSFDETKSLINELKK* |
| | (SEQ ID NO: 52) |
| Cas13f.2 | MSPDFIKLEKQEAAFYFNQTELNLKAIESNILDKQQRMILLNNPRILAKVGNFIFNFRDVT |
| | KNAKGEIDCLLFKLEELRNFYSHYVHTDNVKELSNGEKPLLERYYQIAIQATRSEDVKFEL |
| | FETRNENKITDAGVLFFLCMFLKKSQANKLISGISGFKRNDPTGQPRRNLFTYFSAREGYK |
| | ALPDMQKHFLLFTLVNYLSNQDEYISELKQYGEIGQGAFFNRIASTFLNISGISGNTKFYS |
| | YQSKRIKEQRGELNSEKDSFEWIEPFQGNSYFEINGHKGVIGEDELKELCYALLVAKQDIN |
| | AVEGKIMQFLKKFRNTGNLQQVKDDEMLEIEYFPASYFNESKKEDIKKEILGRLDKKIRSC |
| | SAKAEKAYDKMKEVMEFINNSLPAEEKLKRKDYRRYLKMVRFWSREKGNIEREFRTKEWSK |
| | YFSSDFWRKNNLEDVYKLATQKNAELFKNLKAAAEKMGETEFEKYQQINDVKDLASLRRLT |
| | QDFGLKWEEKDWEEYSEQIKKQITDRQKLTIMKQRVTAELKKKHGIENLNLRITIDSNKSR |
| | KAVLNRIAIPRGFVKKHILGWQGSEKISKNIREAECKILLSKKYEELSRQFFEAGNFDKLT |
| | QINGLYEKNKLTAFMSVYLMGRLNIQLNKHTELGNLKKTEVDFKISDKVTEKIPFSQYPSL |
| | VYAMSRKYVDNVDKYKFSHQDKKKPFLGKIDSIEKERIEFIKEVLDFEEYLFKNKVIDKSK |
| | FSDTATHISFKEICDEMGKKGCNRNKLTELNNARNAALHGEIPSETSFREAKPLINELKK* |
| | (SEQ ID NO: 53) |
| Cas13f.3 | MSPDFIKLEKQEAAFYFNQTELNLKAIESNIFDKQQRVILLNNPQILAKVGDFIFNFRDVT |
| | KNAKGEIDCLLLKLRELRNFYSHYVYTDDVKILSNGERPLLEKYYOFAIEATGSENVKLEI |
| | IESNNRLTEAGVLFFLCMFLKKSQANKLISGISGFKRNDPTGQPRRNLFTYFSVREGYKVV |
| | PDMQKHFLLFVLVNHLSGQDDYIEKAQKPYDIGEGLFFHRIASTFLNISGILRNMEFYIYQ |
| | SKRLKEQQGELKREKDIFPWIEPFQGNSYFEINGNKGIIGEDELKELCYALLVAGKDVRAV |
| | EGKITQFLEKFKNADNAQQVEKDEMLDRNNFPANYFAESNIGSIKEKILNRLGKTDDSYNK |
| | TGTKIKPYDMMKEVMEFINNSLPADEKLKRKDYRRYLKMVRIWDSEKDNIKREFESKEWSK |
| | YFSSDFWMAKNLERVYGLAREKNAELFNKLKAVVEKMDEREFEKYRLINSAEDLASLRRLA |
| | KDFGLKWEEKDWQEYSGQIKKQISDRQKLTIMKQRITAELKKKHGIENLNLRITIDSNKSR |
| | KAVLNRIAVPRGFVKEHILGWQGSEKVSKKTREAKCKILLSKEYEELSKQFFQTRNYDKMT |
| | QVNGLYEKNKLLAFMVVYLMERLNILLNKPTELNELEKAEVDFKISDKVMAKIPFSQYPSL |
| | VYAMSSKYADSVGSYKFENDEKNKPFLGKIDTIEKQRMEFIKEVLGFEEYLFEKKIIDKSE |
| | FADTATHISFDEICNELIKKGWDKDKLTKLKDARNAALHGEIPAETSFREAKPLINGLKK* |
| | (SEQ ID NO: 54) |
| Cas13f.4 | MNIIKLKKEEAAFYFNQTILNLSGLDEIIEKQIPHIISNKENAKKVIDKIFNNRLLLKSVE |
| | NYIYNFKDVAKNARTEIEAILLKLVELRNFYSHYVHNDTVKILSNGEKPILEKYYQIAIEA |
| | TGSKNVKLVIIENNNCLTDSGVLFLLCMFLKKSQANKLISSVSGFKRNDKEGQPRRNLFTY |
| | YSVREGYKVVPDMQKHFLLFALVNHLSEQDDHIEKQQQSDELGKGLFFHRIASTFLNESGI |
| | FNKMQFYTYQSNRLKEKRGELKHEKDTFTWIEPFQGNSYFTLNGHKGVISEDQLKELCYTI |
| | LIEKQNVDSLEGKIIQFLKKFQNVSSKQQVDEDELLKREYFPANYFGRAGTGTLKEKILNR |
| | LDKRMDPTSKVTDKAYDKMIEVMEFINMCLPSDEKLRQKDYRRYLKMVRFWNKEKHNIKRE |
| | FDSKKWTRFLPTELWNKRNLEEAYQLARKENKKKLEDMRNQVRSLKENDLEKYQQINYVND |
| | LENLRLLSQELGVKWQEKDWVEYSGQIKKQISDNQKLTIMKQRITAELKKMHGIENLNLRI |
| | SIDTNKSRQTVMNRIALPKGFVKNHIQQNSSEKISKRIREDYCKIELSGKYEELSRQFFDK |
| | KNFDKMTLINGLCEKNKLIAFMVIYLLERLGFELKEKTKLGELKQTRMTYKISDKVKEDIP |
| | LSYYPKLVYAMNRKYVDNIDSYAFAAYESKKAILDKVDIIEKQRMEFIKQVLCFEEYIFEN |
| | RIIEKSKFNDEETHISFTQIHDELIKKGRDTEKLSKLKHARNKALHGEIPDGTSFEKAKLL |
| | INEIKK* (SEQ ID NO: 55) |
| Cas13f.5 | MNAIELKKEEAAFYFNQARLNISGLDEIIEKQLPHIGSNRENAKKTVDMILDNPEVLKKME |
| | NYVFNSRDIAKNARGELEALLLKLVELRNFYSHYVHKDDVKTLSYGEKPLLDKYYEIAIEA |
| | TGSKDVRLEIIDDKNKLTDAGVLFLLCMFLKKSEANKLISSIRGFKRNDKEGQPRRNLFTY |
| | YSVREGYKVVPDMQKHFLLFTLVNHLSNQDEYISNLRPNQEIGQGGFFHRIASKFLSDSGI |
| | LHSMKFYTYRSKRLTEQRGELKPKKDHFTWIEPFQGNSYFSVQGQKGVIGEEQLKELCYVL |
| | LVAREDFRAVEGKVTQFLKKFQNANNVQQVEKDEVLEKEYFPANYFENRDVGRVKDKILNR |
| | LKKITESYKAKGREVKAYDKMKEVMEFINNCLPTDENLKLKDYRRYLKMVRFWGREKENIK |
| | REFDSKKWERFLPRELWQKRNLEDAYQLAKEKNTELFNKLKTTVERMNELEFEKYQQINDA |
| | KDLANLRQLARDFGVKWEEKDWQEYSGQIKKQITDRQKLTIMKQRITAALKKKQGIENLNL |
| | RITTDTNKSRKVVLNRIALPKGFVRKHILKTDIKISKQIRQSQCPIILSNNYMKLAKEFFE |
| | ERNFDKMTQINGLFEKNVLIAFMIVYLMEQLNLRLGKNTELSNLKKTEVNFTITDKVTEKV |
| | QISQYPSLVFAINREYVDGISGYKLPPKKPKEPPYTFFEKIDAIEKERMEFIKQVLGFEEH |
| | LFEKNVIDKTRFTDTATHISFNEICDELIKKGWDENKIIKLKDARNAALHGKIPEDTSFDE |
| | AKVLINELKK* (SEQ ID NO: 56) |

[0260] In the sequences above, the two RX4-6H (RXXXXH) motifs in each effector are double-underlined. In Cas13e.1, the C-terminal motif may have two possibilities due to the RR and HH sequences flanking the motif. Mutations at one or both such domains may create an RNase dead version (or “dCas) of the Cas13e and Cas13f effector proteins, homologs, orthologs, fusions, conjugates, derivatives, or functional fragments thereof, while substantially maintaining their ability to bind the guide RNA and the target RNA complementary to the guide RNA.

[0261] The corresponding DR coding sequences for the Cas effectors are listed below:

| | |
|---|---|
| Cas13e.1 | GCTGGAGCAGCCCCCGATTTGTGGGGTGATTACAGC |
| | (SEQ ID NO: 57) |
| Cas13e.2 | GCTGAAGAAGCCTCCGATTTGAGAGGTGATTACAGC |
| | (SEQ ID NO: 58) |
| Cas13f.l | GCTGTGATAGACCTCGATTTGTGGGGTAGTAACAGC |
| | (SEQ ID NO: 59) |
| Cas13f.2 | GCTGTGATAGACCTCGATTTGTGGGGTAGTAACAGC |
| | (SEQ ID NO: 60) |
| Cas13f.3 | GCTGTGATAGACCTCGATTTGTGGGGTAGTAACAGC |
| | (SEQ ID NO: 61) |
| Cas13f.4 | GCTGTGATGGGCCTCAATTTGTGGGGAAGTAACAGC |
| | (SEQ ID NO: 62) |
| Cas13f.5 | GCTGTGATAGGCCTCGATTTGTGGGGTAGTAACAGC |
| | (SEQ ID NO: 63) |

[0262] In some embodiments, a subject engineered Cas13 effector enzyme, such as those either substantially lacking or having enhanced collateral activity is based on a “derivative” of a wild-type Type VI-D, Type VI-E and VI-F CRISPR-Cas effector proteins, said derivative having an amino acid sequence with at least about 80% sequence identity to the amino acid sequence of any one of SEQ ID NOs: 50-56 and 101 above (e.g., 81%, 82%, 83%, 84%, 85%, 86%, 87% 88%, 89%, 90%, 91%, 92%, 93%, 94%, 95%, 96%, 97%, 98%, 99%, or 100%). Such derivative Cas effectors sharing significant protein sequence identity to any one of SEQ ID NOs: 50-56 and 101 have retained at least one of the functions of the Cas of SEQ ID NOs: 50-56 and 101 (see below), such as the ability to bind to and form a complex with a crRNA comprising at least one of the DR sequences of Cas13d, and SEQ ID NOs: 57-63. For example, a Cas13e.1 derivative may share 85% amino acid sequence identity to SEQ ID NO: 50, 51, 52, 53, 54, 55, or 56, respectively, and retains the ability to bind to and form a complex with a crRNA having a DR sequence of SEQ ID NO: 57, 58, 59, 60, 61, 62, or 63, respectively.

[0263] In certain embodiments, the sequence identity between the derivative and the wild-type Cas13 is based on regions outside the regions defined by the mutant regions in Examples 1, 2, 4 and 5, such as SEQ ID NOs: 16, 20, 24, 28, and 32.

[0264] In some embodiments, the derivative comprises conserved amino acid residue substitutions. In some embodiments, the derivative comprises only conserved amino acid residue substitutions (i.e., all amino acid substitutions in the derivative are conserved substitutions, and there is no substitution that is not conserved).

[0265] In some embodiments, the derivative comprises no more than 1, 2, 3, 4, 5, 6, 7, 8, 9, or 10 amino acid insertions or deletions into any one of the wild-type sequences of Cas13d, and SEQ ID NOs: 50-56. The insertion and/or deletion maybe clustered together, or separated throughout the entire length of the sequences, so long as at least one of the functions of the wild-type sequence is preserved. Such functions may include the ability to bind the guide/crRNA, the RNase activity, the ability to bind to and/or cleave the target RNA complementary to the guide/crRNA. In some embodiments, the insertions and/or deletions are not present in the RXXXXH motifs, or within 5, 10, 15, or 20 residues from the RXXXXH motifs.

[0266] In some embodiments, the derivative has retained the ability to bind guide RNA/crRNA.

[0267] In some embodiments, the derivative has retained the guide/crRNA-activated RNase activity.

[0268] In some embodiments, the derivative has retained the ability to bind target RNA and/or cleave the target RNA in the presence of the bound guide/crRNA that is complementary in sequence to at least a portion of the target RNA.

[0269] In other embodiments, the derivative has completely or partially lost the guide/crRNA-activated RNase activity, due to, for example, mutations in one or more catalytic residues of the RNA-guided RNase. Such derivatives are sometimes referred to as dCas, such as dCas13d and dCas13e.1.

[0270] Thus in certain embodiments, the derivative may be modified to have diminished nuclease/RNase activity, e.g., nuclease inactivation of at least 50%, at least 60%, at least 70%, at least 80%, at least 90%, at least 95%, at least 97%, or 100% as compared with the counterpart wild type proteins. The nuclease activity can be diminished by several methods known in the art, e.g., introducing mutations into the nuclease (catalytic) domains of the proteins. In some embodiments, catalytic residues for the nuclease activities are identified, and these amino acid residues can be substituted by different amino acid residues (e.g., glycine or alanine) to diminish the nuclease activity. In some embodiments, the amino acid substitution is a conservative amino acid substitution. In some embodiments, the amino acid substitution is a non-conservative amino acid substitution.

[0271] In some embodiments, the modification comprises one or more mutations (e.g., amino acid deletions, insertions, or substitutions) in at least one HEPN domain. In some embodiments, there is one, two, three, four, five, six, seven, eight, nine, or more amino acid substitutions in at least one HEPN domain.

[0272] For example, in some embodiments, the one or more mutations comprise a substitution (e.g., an alanine substitution) at an amino acid residue corresponding to R84, H89, R739, H744, R740, H745 of SEQ ID NO: 50 or R97, H102, R770, H775 of SEQ ID NO: 51 or R77, H82, R764, H769 of SEQ ID NO: 52, or R79, H84, R766A, H771 of SEQ ID NO: 53, or R79, H84, R766, H771 of SEQ ID NO: 54, or R89, H94, R773, H778 of SEQ ID NO: 55, or R89, H94, R777, H782 of SEQ ID NO: 56.

[0273] In certain embodiments, the one or more mutations comprises, consists essentially of, or consists of: (a) substitutions within 1, 2, 3, 4, or 5 of said stretches of 15-20 consecutive amino acids within the region; (b) a mutation corresponds to a Cas13d mutation of Example 4 that retains at least about 75% of guide RNA-specific cleavage of wild-type Cas13d (such as SEQ ID NO: 101), and exhibits less than about 27.5% collateral effect of wild-type Cas13d (such as SEQ ID NO: 101); (c) a mutation corresponds to the N1V7, N2V7, N2V8 (cfCas13d), N3V7, or N15V4 mutation of Cas13d mutation; (d) a mutation corresponds to a Cas13d mutation of Example 4 that retains between about 25-75% of guide RNA-specific cleavage of wild-type Cas13d (such as SEQ ID NO: 101), and exhibits less than about 27.5% collateral effect of wild-type Cas13d (such as SEQ ID NO: 101); (e) a mutation corresponds to the N2V4, N2V5, N4V3, N6V3, N10V6, N15V2, N20V6, or N20-Y910A mutation of Cas13d mutation; (f) a mutation corresponds to a Cas13e mutation of Example 1, 2, or 5 that retains at least about 75% of guide RNA-specific cleavage of wild-type Cas13e (such as SEQ ID NO: 4), and exhibits less than about 25% collateral effect of wild-type Cas13e (such as SEQ ID NO: 4); (f) a mutation corresponds to the M1V4, M2V2, M2V3, M2V4, M5V1, M6V2, M6V3, M6V4, M7V1, M7V2, M7V3, M7-Y55A, M7-Y61A, M11V1, M12V3, M15V1, M15V2, M15-Y643A, M15-Y647 A, M16V1, M16V2, M17V2, M18V2, M18V3, M19V2, M19V3, or M19-IA mutation of Cas13e mutation; (g) a mutation corresponds to a Cas13e mutation of Example 5 that retains between about 25-75% of guide RNA-specific cleavage of wild-type Cas13e (such as SEQ ID NO: 4), and exhibits less than about 25% collateral effect of wild-type Cas13e (such as SEQ ID NO: 4); and/or (h) a mutation corresponds to the M17YY (cfCas13e), M8V4, M9V1, M11V2, M11V3, M13V1, M13V2, M13V3, M15V3, or M20V2 mutation of Cas13e mutation.

[0274] In certain embodiments, the one or more mutations or the two or more mutations may be in a catalytically active domain of the effector protein comprising a HEPN domain, or a catalytically active domain which is homologous to a HEPN domain. In certain embodiments, the effector protein comprises one or more of the following mutations: R84A, H89A, R739A, H744A, R740A, H745A (wherein amino acid positions correspond to amino acid positions of Cas13e.1).

[0275] The skilled person will understand that corresponding amino acid positions in different Cas13 proteins, such as different Cas13d, Cas13e and Cas13f proteins, may be mutated to the same effect. In this regard, FIGS. 23A-23J provides an exemplary multisequence alignment of several representative Cas13 family enzymes. One of skill in the art can readily map the mutations in any Cas13 family protein sharing substantial sequence homology/identical to any of the sequences in FIGS. 23A-23J and 24A-24M, in order to determine the mutations “corresponding to” the exemplified Cas13d and Cas13e mutations described herein.

[0276] In certain embodiments, one or more mutations abolishes catalytic activity of the protein completely or partially (e.g. altered cleavage rate, altered specificity, etc.).

[0277] Other exemplary (catalytic) residue mutations include: R97A, H102A, R770A, H775A of Cas13e.2, or R77A, H82A, R764A, H769A of Cas13f.1, or R79A, H84A, R766A, H771A of Cas13f.2, or R79A, H84A, R766A, H771A of Cas13f.3, or R89A, H94A, R773A, H778A of Cas13f.4, or R89A, H94A, R777A, H782A of Cas13f.5. In certain embodiments, any of the R and/or H residues herein may be replaced not be A but by G, V, or I.

[0278] The presence of at least one of these mutations results in a derivative having reduced or diminished guide sequence-dependent RNase activity as compared to the corresponding wild-type protein lacking the mutations. The additional presence of any one of the mutations in the subject engineered Cas13 substantially lacking collateral effect can reduce/eliminate off-target effect resulting from non-specific RNA binding.

[0279] In certain embodiments, the effector protein as described herein is a “dead” effector protein, such as a dead Cas13e or Cas13f effector protein (i.e. dCas13e and dCas13f). In certain embodiments, the effector protein has one or more mutations in HEPN domain 1 (N-terminal). In certain embodiments, the effector protein has one or more mutations in HEPN domain 2 (C-terminal). In certain embodiments, the effector protein has one or more mutations in HEPN domain 1 and HEPN domain 2.

[0280] The inactivated Cas or derivative or functional fragment thereof can be fused or associated with one or more heterologous/functional domains (e.g., via fusion protein, linker peptides, “GS” linkers, etc.). These functional domains can have various activities, e.g., methylase activity, demethylase activity, transcription activation activity, transcription repression activity, transcription release factor activity, histone modification activity, RNA cleavage activity, DNA cleavage activity, nucleic acid binding activity, base-editing activity, and switch activity (e.g., light inducible). In some embodiments, the functional domains are Krüppel associated box (KRAB), SID (e.g. SID4X), VP64, VPR, VP16, FokI, P65, HSF1, MyoD1, Adenosine Deaminase Acting on RNA such as ADAR1, ADAR2, APOBEC, cytidine deaminase (AID), TAD, mini-SOG, APEX, and biotin-APEX.

[0281] In some embodiments, the functional domain is a base editing domain, e.g., ADAR1 (including wild-type or ADAR2DD version thereof, with or without the E1008Q and/or the E488Q mutation(s)), ADAR2 (including wild-type or ADAR2DD version thereof, with or without the E1008Q and/or the E488Q mutation(s)), APOBEC, or AID.

[0282] In some embodiments, the functional domain may comprise one or more nuclear localization signal (NLS) domains. The one or more heterologous functional domains may comprise at least two or more NLS domains. The one or more NLS domain(s) may be positioned at or near or in proximity to a terminus of the effector protein (e.g., Cas13e/Cas13f effector proteins) and if two or more NLSs, each of the two may be positioned at or near or in proximity to a terminus of the effector protein (e.g., Cas13e/Cas13f effector proteins).

[0283] In some embodiments, at least one or more heterologous functional domains may be at or near the amino-terminus of the effector protein and/or wherein at least one or more heterologous functional domains is at or near the carboxy-terminus of the effector protein. The one or more heterologous functional domains may be fused to the effector protein. The one or more heterologous functional domains may be tethered to the effector protein. The one or more heterologous functional domains may be linked to the effector protein by a linker moiety.

[0284] In some embodiments, multiple (e.g., two, three, four, five, six, seven, eight, or more) identical or different functional domains are present.

[0285] In some embodiments, the functional domain (e.g., a base editing domain) is further fused to an RNA-binding domain (e.g., MS2).

[0286] In some embodiments, the functional domain is associated to or fused via a linker sequence (e.g., a flexible linker sequence or a rigid linker sequence). Exemplary linker sequences and functional domain sequences are provided in table below.

Amino Acid Sequences of Motifs and Functional
Domains in Engineered Variants of Type VI-D,
Type VI E and VI-F CRISPR Cas Effectors

| | |
|---|---|
| Linker 1 | GS |
| Linker 2 | GSGGGGS (SEQ ID NO: 70) |
| Linker 3 | GGGGSGGGGSGGGGS |
| | (SEQ ID NO: 71) |
| ADAR1DD-WT | SEQ ID NO: 72 |
| ADAR1DD-E10080 | SEQ ID NO: 73 |
| ADAR2DD-WT | SEQ ID NO: 74 |
| ADAR2DD-E4880 | SEQ ID NO: 75 |
| AID-APOBEOl | SEQ ID NO: 76 |
| Lamprey_AID-APOBEC1 | SEQ ID NO: 77 |
| APOBEC1_BE1 | SEQ ID NO: 78 |

[0287] The positioning of the one or more functional domains on the inactivated Cas proteins is one that allows for correct spatial orientation for the functional domain to affect the target with the attributed functional effect. For example, if the functional domain is a transcription activator (e.g., VP16, VP64, or p65), the transcription activator is placed in a spatial orientation that allows it to affect the transcription of the target. Likewise, a transcription repressor is positioned to affect the transcription of the target, and a nuclease (e.g., FokI) is positioned to cleave or partially cleave the target. In some embodiments, the functional domain is positioned at the N-terminus of the Cas/dCas. In some embodiments, the functional domain is positioned at the C-terminus of the Cas/dCas. In some embodiments, the inactivated CRISPR-associated protein (dCas) is modified to comprise a first functional domain at the N-terminus and a second functional domain at the C-terminus.

[0288] Various examples of inactivated CRISPR-associated proteins fused with one or more functional domains and methods of using the same are described, e.g., in International Publication No. WO 2017/219027, which is incorporated herein by reference in its entirety, and in particular with respect to the features described herein.

[0289] In some embodiments, instead of using full-length wild-type (SEQ ID NOs: 50-56) or derivative Type VI-E and VI-F Cas effectors, “functional fragments” thereof can be used.

[0290] A “functional fragment,” as used herein, refers to a fragment of a wild-type Cas13 protein such as any one of SEQ ID NOs: 50-56 and 101, or a derivative thereof, that has less-than full-length sequence. The deleted residues in the functional fragment can be at the N-terminus, the C-terminus, and/or internally. The functional fragment retains at least one function of the wild-type VI-D, VI-E or VI-F Cas, or at least one function of its derivative. Thus a functional fragment is defined specifically with respect to the function at issue. For example, a functional fragment, wherein the function is the ability to bind crRNA and target RNA, may not be a functional fragment with respect to the RNase function, because losing the RXXXXH motifs at both ends of the Cas may not affect its ability to bind a crRNA and target RNA, but may eliminate/destroy the RNase activity. In certain embodiments, the engineered Cas13 of the invention including a functional fragment of an engineered Cas13 that substantially retains the corresponding wild-type Cas13's guide sequence-dependent RNase activity, but substantially lacks collateral activity.

[0291] In some embodiments, compared to full-length wild-type sequences, the engineered Class 2 type VI effector proteins or derivatives thereof or functional fragments thereof lacks about 30, 60, 90, 120, 150, or about 180 residues from the N-terminus.

[0292] In some embodiments, compared to full-length wild-type sequences, the engineered Class 2 type VI effector proteins or derivatives thereof or functional fragments thereof lacks about 30, 60, 90, 120, or about 150 residues from the C-terminus.

[0293] In some embodiments, compared to full-length wild-type sequences, the engineered Class 2 type VI effector proteins or derivatives thereof or functional fragments thereof lacks about 30, 60, 90, 120, 150, or about 180 residues from the N-terminus, and lacks about 30, 60, 90, 120, or about 150 residues from the C-terminus.

[0294] In some embodiments, the engineered Class 2 Type VI Cas13 effector proteins or derivatives thereof or functional fragments thereof have RNase activity, e.g., guide/crRNA-activated specific RNase activity.

[0295] In some embodiments, the engineered Class 2 Type VI Cas13 effector proteins or derivatives thereof or functional fragments thereof have no substantial/detectable collateral RNase activity.

[0296] The present disclosure also provides a split version of the engineered Class 2 type VI Cas13 effector enzyme described herein (e.g., a Type VI-D, VI-E or VI-F CRISPR-Cas effector protein). The split version of the engineered Cas13 may be advantageous for delivery. In some embodiments, the engineered Cas13 is split into two parts of the enzyme, which together substantially comprise a functioning engineered Class 2 type VI Cas13.

[0297] The split can be done in a way that the catalytic domain(s) are unaffected. The CRISPR-associated protein may function as a nuclease or may be an inactivated enzyme, which is essentially a RNA-binding protein with very little or no catalytic activity (e.g., due to mutation(s) in its catalytic domains). Split enzymes are described, e.g., in Wright et al., “Rational design of a split-Cas9 enzyme complex,” Proc. Nat'l. Acad. Sci. 112(10): 2984-2989, 2015, which is incorporated herein by reference in its entirety.

[0298] For example, in some embodiments, the nuclease lobe and a-helical lobe are expressed as separate polypeptides. Although the lobes do not interact on their own, the crRNA recruits them into a ternary complex that recapitulates the activity of full-length CRISPR-associated proteins and catalyzes site-specific cleavage. The use of a modified crRNA abrogates split-enzyme activity by preventing dimerization, allowing for the development of an inducible dimerization system.

[0299] In some embodiments, the split CRISPR-associated protein can be fused to a dimerization partner, e.g., by employing rapamycin sensitive dimerization domains. This allows the generation of a chemically inducible CRISPR-associated protein for temporal control of the activity of the protein. The CRISPR-associated protein can thus be rendered chemically inducible by being split into two fragments and rapamycin-sensitive dimerization domains can be used for controlled re-assembly of the protein.

[0300] The split point is typically designed in silico and cloned into the constructs. During this process, mutations can be introduced to the split CRISPR-associated protein and non-functional domains can be removed.

[0301] In some embodiments, the two parts or fragments of the split CRISPR-associated protein (i.e., the N-terminal and C-terminal fragments), can form a full CRISPR-associated protein, comprising, e.g., at least 70%, at least 80%, at least 90%, at least 95%, or at least 99% of the sequence of the wild-type CRISPR-associated protein.

[0302] The CRISPR-associated proteins described herein (e.g., a Type VI-D, VI-E or VI-F CRISPR-Cas effector protein) can be designed to be self-activating or self-inactivating. For example, the target sequence can be introduced into the coding construct of the CRISPR-associated protein. Thus, the CRISPR-associated protein can cleave the target sequence, as well as the construct encoding the protein thereby self-inactivating their expression. Methods of constructing a self-inactivating CRISPR system are described, e.g., in Epstein and Schaffer, Mol. Ther. 24: S50, 2016, which is incorporated herein by reference in its entirety.

[0303] In some other embodiments, an additional crRNA, expressed under the control of a weak promoter (e.g., 7SK promoter), can target the nucleic acid sequence encoding the CRISPR-associated protein to prevent and/or block its expression (e.g., by preventing the transcription and/or translation of the nucleic acid). The transfection of cells with vectors expressing the CRISPR-associated protein, the crRNAs, and crRNAs that target the nucleic acid encoding the CRISPR-associated protein can lead to efficient disruption of the nucleic acid encoding the CRISPR-associated protein and decrease the levels of CRISPR-associated protein, thereby limiting its activity.

[0304] In some embodiments, the activity of the CRISPR-associated protein can be modulated through endogenous RNA signatures (e.g., miRNA) in mammalian cells. A CRISPR-associated protein switch can be made by using a miRNA-complementary sequence in the 5′-UTR of mRNA encoding the CRISPR-associated protein. The switches selectively and efficiently respond to miRNA in the target cells. Thus, the switches can differentially control the Cas activity by sensing endogenous miRNA activities within a heterogeneous cell population. Therefore, the switch systems can provide a framework for cell-type selective activity and cell engineering based on intracellular miRNA information (see, e.g., Hirosawa et al., Nucl. Acids Res. 45(13): e118, 2017).

[0305] The engineered Class 2 type VI Cas13 effectors, such as those either substantially lacking or having enhanced collateral activity (e.g., engineered Type VI-D, VI-E and VI-F CRISPR-Cas effector proteins) can be inducibly expressed, e.g., their expression can be light-induced or chemically-induced. This mechanism allows for activation of the functional domain in the CRISPR-associated proteins. Light inducibility can be achieved by various methods known in the art, e.g., by designing a fusion complex wherein CRY2 PHR/CIBN pairing is used in split CRISPR-associated proteins (see, e.g., Konermann et al., “Optical control of mammalian endogenous transcription and epigenetic states,” Nature 500:7463, 2013.

[0306] Chemical inducibility can be achieved, e.g., by designing a fusion complex wherein FKBP/FRB (FK506 binding protein/FKBP rapamycin binding domain) pairing is used in split CRISPR-associated proteins. Rapamycin is required for forming the fusion complex, thereby activating the CRISPR-associated proteins (see, e.g., Zetsche et al., “A split-Cas9 architecture for inducible genome editing and transcription modulation,” Nature Biotech. 33:2:139-42, 2015).

[0307] Furthermore, expression of the engineered Class 2 type VI Cas13 effectors, such as those either substantially lacking or having enhanced collateral activity can be modulated by inducible promoters, e.g., tetracycline or doxycycline controlled transcriptional activation (Tet-On and Tet-Off expression system), hormone inducible gene expression system (e.g., an ecdysone inducible gene expression system), and an arabinose-inducible gene expression system. When delivered as RNA, expression of the RNA targeting effector protein can be modulated via a riboswitch, which can sense a small molecule like tetracycline (see, e.g., Goldfless et al., “Direct and specific chemical control of eukaryotic translation with a synthetic RNA-protein interaction,” Nucl. Acids Res. 40:9: e64-e64, 2012).

[0308] Various embodiments of inducible CRISPR-associated proteins and inducible CRISPR systems are described, e.g., in U.S. Pat. No. 8,871,445, US Publication No. 2016/0208243, and International Publication No. WO 2016/205764, each of which is incorporated herein by reference in its entirety.

[0309] In some embodiments, the engineered Class 2 type VI Cas13 effectors, such as those either substantially lacking or having enhanced collateral activity include at least one (e.g., 1, 2, 3, 4, 5, 6, 7, 8, 9, or 10) Nuclear Localization Signal (NLS) attached to the N-terminal or C-terminal of the protein. Non-limiting examples of NLSs include an NLS sequence derived from: the NLS of the SV40 virus large T-antigen, having the amino acid sequence of SEQ ID NO: 79; the NLS from nucleoplasmin (e.g., the nucleoplasmin bipartite NLS with the sequence of SEQ ID NO: 80); the c-myc NLS having the amino acid sequence of SEQ ID NO: 81 or 82; the hRNPA1 M9 NLS having the sequence of SEQ ID NO: 83; the sequence of SEQ ID NO: 84 of the IBB domain from importin-alpha; the sequences of SEQ ID NO: 85 or 86 of the myoma T protein; the sequence of SEQ ID NO: 87 of human p53; the sequence of SEQ ID NO: 88 of mouse c-abl IV; the sequences of SEQ ID NO: 89 or 90 of the influenza virus NS1; the sequence of SEQ ID NO: 91 of the Hepatitis virus delta antigen; the sequence of SEQ ID NO: 92 of the mouse Mx1 protein; the sequence of SEQ ID NO: 93 of the human poly(ADP-ribose) polymerase; and the sequence of SEQ ID NO: 94 of the human glucocorticoid receptor. In some embodiments, the CRISPR-associated protein comprises at least one (e.g., 1, 2, 3, 4, 5, 6, 7, 8, 9, or 10) Nuclear Export Signal (NES) attached the N-terminal or C-terminal of the protein. In a preferred embodiment a C-terminal and/or N-terminal NLS or NES is attached for optimal expression and nuclear targeting in eukaryotic cells, e.g., human cells.

[0310] In some embodiments, the engineered Class 2 type VI Cas13 effectors, such as those either substantially lacking or having enhanced collateral activity are mutated at one or more amino acid residues to alter one or more functional activities.

[0311] For example, in some embodiments, the engineered Class 2 type VI Cas13 effectors, such as those either substantially lacking or having enhanced collateral activity is mutated at one or more amino acid residues to alter its helicase activity.

[0312] In some embodiments, the engineered Class 2 type VI Cas13 effectors, such as those either substantially lacking or having enhanced collateral activity is mutated at one or more amino acid residues to alter its nuclease activity (e.g., endonuclease activity or exonuclease activity), such as the collateral nuclease activity that is not dependent on guide sequence.

[0313] In some embodiments, the engineered Class 2 type VI Cas13 effectors, such as those either substantially lacking or having enhanced collateral activity is mutated at one or more amino acid residues to alter its ability to functionally associate with a guide RNA.

[0314] In some embodiments, the engineered Class 2 type VI Cas13 effectors, such as those either substantially lacking or having enhanced collateral activity is mutated at one or more amino acid residues to alter its ability to functionally associate with a target nucleic acid.

[0315] In some embodiments, the engineered Class 2 type VI Cas13 effectors, such as those either substantially lacking or having enhanced collateral activity described herein are capable of cleaving a target RNA molecule.

[0316] In some embodiments, the engineered Class 2 type VI Cas13 effectors, such as those either substantially lacking or having enhanced collateral activity is mutated at one or more amino acid residues to alter its cleaving activity. For example, in some embodiments, the engineered Class 2 type VI Cas13 effectors, such as those either substantially lacking or having enhanced collateral activity may comprise one or more mutations that render the enzyme incapable of cleaving a target nucleic acid.

[0317] In some embodiments, the engineered Class 2 type VI Cas13 effectors, such as those either substantially lacking or having enhanced collateral activity is capable of cleaving the strand of the target nucleic acid that is complementary to the strand to which the guide RNA hybridizes.

[0318] In some embodiments, a engineered Class 2 type VI Cas13 effectors, such as those either substantially lacking or having enhanced collateral activity described herein can be engineered to have a deletion in one or more amino acid residues to reduce the size of the enzyme while retaining one or more desired functional activities (e.g., nuclease activity and the ability to interact functionally with a guide RNA). The truncated engineered Class 2 type VI Cas13 effectors, such as those either substantially lacking or having enhanced collateral activity can be advantageously used in combination with delivery systems having load limitations.

[0319] In some embodiments, the engineered Class 2 type VI Cas13 effectors, such as those either substantially lacking or having enhanced collateral activity described herein can be fused to one or more peptide tags, including a His-tag, GST-tag, a V5-tag, FLAG-tag, HA-tag, VSV-G-tag, Trx-tag, or myc-tag.

[0320] In some embodiments, the engineered Class 2 type VI Cas13 effectors, such as those either substantially lacking or having enhanced collateral activity described herein can be fused to a detectable moiety such as GST, a fluorescent protein (e.g., GFP, HcRed, DsRed, CFP, YFP, or BFP), or an enzyme (such as HRP or CAT).

[0321] In some embodiments, the engineered Class 2 type VI Cas13 effectors, such as those either substantially lacking or having enhanced collateral activity described herein can be fused to MBP, LexA DNA binding domain, or Gal4 DNA-binding domain.

[0322] In some embodiments, the engineered Class 2 type VI Cas13 effectors, such as those either substantially lacking or having enhanced collateral activity described herein can be linked to or conjugated with a detectable label such as a fluorescent dye, including FITC and DAPI.

[0323] In any of the embodiments herein, the linkage between the engineered Class 2 type VI Cas13 effectors, such as those either substantially lacking or having enhanced collateral activity described herein and the other moiety can be at the N- or C-terminal of the CRISPR-associated proteins, and sometimes even internally via covalent chemical bonds. The linkage can be affected by any chemical linkage known in the art, such as peptide linkage, linkage through the side chain of amino acids such as D, E, S, T, or amino acid derivatives (Ahx, β-Ala, GABA or Ava), or PEG linkage.

### 3. Polynucleotides

[0324] The invention also provides nucleic acids encoding the proteins described herein (e.g., an engineered Class 2 type VI Cas13 protein, such as those either substantially lacking or having enhanced collateral activity).

[0325] In some embodiments, the nucleic acid is a synthetic nucleic acid. In some embodiments, the nucleic acid is a DNA molecule. In some embodiments, the nucleic acid is an RNA molecule (e.g., an mRNA molecule encoding the engineered Class 2 type VI Cas13 protein, such as those either substantially lacking or having enhanced collateral activity, derivative or functional fragment thereof). In some embodiments, the mRNA is capped, polyadenylated, substituted with 5-methyl cytidine, substituted with pseudouridine, or a combination thereof.

[0326] In some embodiments, the nucleic acid (e.g., DNA) is operably linked to a regulatory element (e.g., a promoter) in order to control the expression of the nucleic acid. In some embodiments, the promoter is a constitutive promoter. In some embodiments, the promoter is an inducible promoter. In some embodiments, the promoter is a cell-specific promoter. In some embodiments, the promoter is an organism-specific promoter.

[0327] Suitable promoters are known in the art and include, for example, a pol I promoter, a pol II promoter, a pol III promoter, a T7 promoter, a U6 promoter, a H1 promoter, retroviral Rous sarcoma virus LTR promoter, a cytomegalovirus (CMV) promoter, a SV40 promoter, a dihydrofolate reductase promoter, and a β-actin promoter. For example, a U6 promoter can be used to regulate the expression of a guide RNA molecule described herein.

[0328] In some embodiments, the nucleic acid(s) are present in a vector (e.g., a viral vector or a phage). The vector can be a cloning vector, or an expression vector. The vectors can be plasmids, phagemids, Cosmids, etc. The vectors may include one or more regulatory elements that allow for the propagation of the vector in a cell of interest (e.g., a bacterial cell or a mammalian cell). In some embodiments, the vector includes a nucleic acid encoding a single component of a CRISPR-associated (Cas) system described herein. In some embodiments, the vector includes multiple nucleic acids, each encoding a component of a CRISPR-associated (Cas) system described herein.

[0329] In one aspect, the present disclosure provides nucleic acid sequences that are at least 50%, 55%, 60%, 65%, 70%, 75%, 80%, 85%, 90%, 91%, 92%, 93%, 94%, 95%, 96%, 97%, 98%, 99%, or 100% identical to the nucleic acid sequences described herein, i.e., nucleic acid sequences encoding the engineered Class 2 type VI Cas13 protein substantially lacking collateral activity, derivatives, functional fragments, or guide/crRNA, including the DR sequences.

[0330] In another aspect, the present disclosure also provides nucleic acid sequences encoding amino acid sequences that are at least 50%, 55%, 60%, 65%, 70%, 75%, 80%, 85%, 90%, 91%, 92%, 93%, 94%, 95%, 96%, 97%, 98%, 99%, or 100% identical to the amino acid sequences of the subject engineered Class 2 type VI Cas13 protein substantially lacking collateral activity.

[0331] In some embodiments, the nucleic acid sequences have at least a portion (e.g., at least 1, 2, 3, 4, 5, 6, 7, 8, 9, 10, 11, 12, 13, 14, 15, 20, 30, 40, 50, 60, 70, 80, 90, or 100 nucleotides, e.g., contiguous or non-contiguous nucleotides) that is the same as the sequences described herein. In some embodiments, the nucleic acid sequences have at least a portion (e.g., at least 1, 2, 3, 4, 5, 6, 7, 8, 9, 10, 11, 12, 13, 14, 15, 20, 30, 40, 50, 60, 70, 80, 90, or 100 nucleotides, e.g., contiguous or non-contiguous nucleotides) that is different from the sequences described herein.

[0332] In related embodiments, the invention provides amino acid sequences having at least a portion (e.g., at least 1, 2, 3, 4, 5, 6, 7, 8, 9, 10, 11, 12, 13, 14, 15, 20, 30, 40, 50, 60, 70, 80, 90, or 100 amino acid residues, e.g., contiguous or non-contiguous amino acid residues) that is the same as the sequences described herein. In some embodiments, the amino acid sequences have at least a portion (e.g., at least 1, 2, 3, 4, 5, 6, 7, 8, 9, 10, 11, 12, 13, 14, 15, 20, 30, 40, 50, 60, 70, 80, 90, or 100 amino acid residues, e.g., contiguous or non-contiguous amino acid residues) that is different from the sequences described herein.

[0333] To determine the percent identity of two amino acid sequences, or of two nucleic acid sequences, the sequences are aligned for optimal comparison purposes (e.g., gaps can be introduced in one or both of a first and a second amino acid or nucleic acid sequence for optimal alignment and non-homologous sequences can be disregarded for comparison purposes). In general, the length of a reference sequence aligned for comparison purposes should be at least 80% of the length of the reference sequence, and in some embodiments is at least 90%, 95%, or 100% of the length of the reference sequence. The amino acid residues or nucleotides at corresponding amino acid positions or nucleotide positions are then compared. When a position in the first sequence is occupied by the same amino acid residue or nucleotide as the corresponding position in the second sequence, then the molecules are identical at that position. The percent identity between the two sequences is a function of the number of identical positions shared by the sequences, taking into account the number of gaps, and the length of each gap, which need to be introduced for optimal alignment of the two sequences. For purposes of the present disclosure, the comparison of sequences and determination of percent identity between two sequences can be accomplished using a Blossum 62 scoring matrix with a gap penalty of 12, a gap extend penalty of 4, and a frameshift gap penalty of 5.

[0334] The proteins described herein (e.g., an engineered Class 2 type VI Cas13 protein substantially lacking collateral activity) can be delivered or used as either nucleic acid molecules or polypeptides.

[0335] In certain embodiments, the nucleic acid molecule encoding the engineered Class 2 type VI Cas13 protein, such as those either substantially lacking or having enhanced collateral activity, derivatives or functional fragments thereof are codon-optimized for expression in a host cell or organism. The host cell may include established cell lines (such as 293T cells) or isolated primary cells. The nucleic acid can be codon optimized for use in any organism of interest, in particular human cells or bacteria. For example, the nucleic acid can be codon-optimized for any prokaryotes (such as E. coli), or any eukaryotes such as human and other non-human eukaryotes including yeast, worm, insect, plants and algae (including food crop, rice, corn, vegetables, fruits, trees, grasses), vertebrate, fish, non-human mammal (e.g., mice, rats, rabbits, dogs, birds (such as chicken), livestock (cow or cattle, pig, horse, sheep, goat etc.), or non-human primates). Codon usage tables are readily available, for example, at the “Codon Usage Database” available at www.kazusa.orjp/codon/, and these tables can be adapted in a number of ways. See Nakamura et al., Nucl. Acids Res. 28:292, 2000 (incorporated herein by reference in its entirety). Computer algorithms for codon optimizing a particular sequence for expression in a particular host cell are also available, such as Gene Forge (Aptagen; Jacobus, Pa.).

[0336] An example of a codon optimized sequence, is in this instance a sequence optimized for expression in a eukaryote, e.g., humans (i.e. being optimized for expression in humans), or for another eukaryote, animal or mammal as herein discussed; see, e.g., SaCas9 human codon optimized sequence in WO 2014/093622 (PCT/US2013/074667). Whilst this is preferred, it will be appreciated that other examples are possible and codon optimization for a host species other than human, or for codon optimization for specific organs is known. In general, codon optimization refers to a process of modifying a nucleic acid sequence for enhanced expression in the host cells of interest by replacing at least one codon (e.g. about or more than about 1, 2, 3, 4, 5, 10, 15, 20, 25, 50, or more codons) of the native sequence with codons that are more frequently or most frequently used in the genes of that host cell while maintaining the native amino acid sequence. Various species exhibit particular bias for certain codons of a particular amino acid. Codon bias (differences in codon usage between organisms) often correlates with the efficiency of translation of messenger RNA (mRNA), which is in turn believed to be dependent on, among other things, the properties of the codons being translated and the availability of particular transfer RNA (tRNA) molecules. The predominance of selected tRNAs in a cell is generally a reflection of the codons used most frequently in peptide synthesis. Accordingly, genes can be tailored for optimal gene expression in a given organism based on codon optimization. Codon usage tables are readily available, for example, at the “Codon Usage Database” available at http://www.kazusa.orjp/codon/ and these tables can be adapted in a number of ways. See Nakamura, Y., et al. “Codon usage tabulated from the international DNA sequence databases: status for the year 2000” Nucl. Acids Res. 28:292 (2000). Computer algorithms for codon optimizing a particular sequence for expression in a particular host cell are also available, such as Gene Forge (Aptagen; Jacobus, Pa.), are also available. In some embodiments, one or more codons (e.g., 1, 2, 3, 4, 5, 10, 15, 20, 25, 50, or more, or all codons) in a sequence encoding a Cas correspond to the most frequently used codon for a particular amino acid.

4. RNA Guides or crRNA

[0337] In some embodiments, the CRISPR systems described herein include at least RNA guide (e.g., a gRNA or a crRNA).

[0338] The architecture of multiple RNA guides is known in the art (see, e.g., International Publication Nos. WO 2014/093622 and WO 2015/070083, the entire contents of each of which are incorporated herein by reference).

[0339] In some embodiments, the CRISPR systems described herein include multiple RNA guides (e.g., one, two, three, four, five, six, seven, eight, or more RNA guides).

[0340] In some embodiments, the RNA guide includes a crRNA. In some embodiments, the RNA guide includes a crRNA but not a tracrRNA.

[0341] Sequences for guide RNAs from multiple CRISPR systems are generally known in the art, see, for example, Grissa et al. (Nucleic Acids Res. 35 (web server issue): W52-7, 2007; Grissa et al., BMC Bioinformatics 8:172, 2007; Grissa et al., Nucleic Acids Res. 36 (web server issue): W145-8, 2008; and Moller and Liang, PeerJ 5: e3788, 2017; the CRISPR database at: crispr.i2bc.paris-saclayfr/crispr/BLAST/CRISPRsBlast.php; and MetaCRAST available at: github.com/molleraj/MetaCRAST). All incorporated herein by reference.

[0342] In some embodiments, the crRNA includes a direct repeat (DR) sequence and a spacer sequence. In certain embodiments, the crRNA comprises, consists essentially of, or consists of a direct repeat sequence linked to a guide sequence or spacer sequence, preferably at the 3′-end of the spacer sequence.

[0343] In general, an engineered Class 2 type VI Cas13 protein, such as those either substantially lacking or having enhanced collateral activity forms a complex with the mature crRNA, which spacer sequence directs the complex to a sequence-specific binding with the target RNA that is complementary to the spacer sequence, and/or hybridizes to the spacer sequence. The resulting complex comprises the engineered Class 2 type VI Cas13 protein, such as those either substantially lacking or having enhanced collateral activity and the mature crRNA bound to the target RNA.

[0344] The direct repeat sequences for the Cas13 systems are generally well conserved, especially at the ends, with, for example, a GCTG for Cas13e and GCTGT for Cas13f at the 5′-end, reverse complementary to a CAGC for Cas13e and ACAGC for Cas13f at the 3′ end. This conservation suggests strong base pairing for an RNA stem-loop structure that potentially interacts with the protein(s) in the locus.

[0345] In some embodiments, the direct repeat sequence, when in RNA, comprises the general secondary structure of 5′-S1a-Ba-S2a-L-S2b-Bb-S1b-3′, wherein segments S1a and S1b are reverse complement sequences and form a first stem (S1) having 4 nucleotides in Cas13e and 5 nucleotides in Cas13f; segments Ba and Bb do not base pair with each other and form a symmetrical or nearly symmetrical bulge (B), and have 5 nucleotides each in Cas13e, and 5 (Ba) and 4 (Bb) or 6 (Ba) and 5 (Bb) nucleotides respectively in Cas13f; segments S2a and S2b are reverse complement sequences and form a second stem (S2) having 5 base pairs in Cas13e and either 6 or 5 base pairs in Cas13f; and L is an 8-nucleotide loop in Cas13e and a 5-nucleotide loop in Cas13f.

[0346] In certain embodiments, S1a has a sequence of GCUG in Cas13e and GCUGU in Cas13f.

[0347] In certain embodiments, S2a has a sequence of GCCCC in Cas13e and A/G CCUC G/A in Cas13f (wherein the first A or G may be absent).

[0348] In some embodiments, the direct repeat sequence comprises or consists of a nucleic acid sequence of SEQ ID NOs: 57-63.

[0349] As used herein, “direct repeat sequence” may refer to the DNA coding sequence in the CRISPR locus, or to the RNA encoded by the same in crRNA. Thus when any of SEQ ID NOs: 57-63 is referred to in the context of an RNA molecule, such as crRNA, each T is understood to represent a U.

[0350] In some embodiments, the direct repeat sequence comprises or consists of a nucleic acid sequence having up to 1, 2, 3, 4, 5, 6, 7, or 8 nucleotides of deletion, insertion, or substitution of SEQ ID NOs: 57-63. In some embodiments, the direct repeat sequence comprises or consists of a nucleic acid sequence having at least 80%, 85%, 90%, 95%, or 97% of sequence identity with SEQ ID NOs: 57-63 (e.g., due to deletion, insertion, or substitution of nucleotides in SEQ ID NOs: 57-63). In some embodiments, the direct repeat sequence comprises or consists of a nucleic acid sequence that is not identical to any one of SEQ ID NOs: 57-63, but can hybridize with a complement of any one of SEQ ID NOs: 57-63 under stringent hybridization conditions, or can bind to a complement of any one of SEQ ID NOs: 57-63 under physiological conditions.

[0351] In certain embodiments, the deletion, insertion, or substitution does not change the overall secondary structure of that of SEQ ID NOs: 57-63 (e.g., the relative locations and/or sizes of the stems and bulges and loop do not significantly deviate from that of the original stems, bulges, and loop). For example, the deletion, insert, or substitution may be in the bulge or loop region so that the overall symmetry of the bulge remains largely the same. The deletion, insertion, or substitution may be in the stems so that the length of the stems do not significantly deviate from that of the original stems (e.g., adding or deleting one base pair in each of the two stems correspond to 4 total base changes).

[0352] In certain embodiments, the deletion, insertion, or substitution results in a derivative DR sequence that may have ±1 or 2 base pair(s) in one or both stems, have ±1, 2, or 3 bases in either or both of the single strands in the bulge, and/or have ±1, 2, 3, or 4 bases in the loop region.

[0353] In certain embodiments, any of the above direct repeat sequences that is different from any one of SEQ ID NOs: 57-63 retains the ability to function as a direct repeat sequence in the Cas13e or Cas13f proteins, as the DR sequence of SEQ ID NOs: 57-63.

[0354] In some embodiments, the direct repeat sequence comprises or consists of a nucleic acid having a nucleic acid sequence of any one of SEQ ID NOs: 57-63, with a truncation of the initial three, four, five, six, seven, or eight 3′ nucleotides.

[0355] In classic CRISPR systems, the degree of complementarity between a guide sequence (e.g., a crRNA) and its corresponding target sequence can be about 50%, 60%, 75%, 80%, 85%, 90%, 95%, 97.5%, 99%, or 100%. In some embodiments, the degree of complementarity is 90-100%.

[0356] The guide RNAs can be about 5, 10, 11, 12, 13, 14, 15, 16, 17, 18, 19, 20, 21, 22, 23, 24, 25, 26, 27, 28, 29, 30, 35, 40, 45, 50, 75, 100, 125, 150, 175, 200 or more nucleotides in length. For example, for use in a functional engineered Cas13e or Cas13f effector protein, or homologs, orthologs, derivatives, fusions, conjugates, or functional fragment thereof, the spacer can be between 10-60 nucleotides, 20-50 nucleotides, 25-45 nucleotides, 25-35 nucleotides, or about 27, 28, 29, 30, 31, 32, or 33 nucleotides. For use in dCas version of any of the above, however, the spacer can be between 10-200 nucleotides, 20-150 nucleotides, 25-100 nucleotides, 25-85 nucleotides, 35-75 nucleotides, 45-60 nucleotides, or about 46, 47, 48, 49, 50, 51, 52, 53, 54, or 55 nucleotides.

[0357] To reduce off-target interactions, e.g., to reduce the guide interacting with a target sequence having low complementarity, mutations can be introduced to the CRISPR systems so that the CRISPR systems can distinguish between target and off-target sequences that have greater than 80%, 85%, 90%, or 95% complementarity. In some embodiments, the degree of complementarity is from 80% to 95%, e.g., about 83%, 84%, 85%, 86%, 87%, 88%, 89%, 90%, 91%, 92%, 93%, 94%, or 95% (for example, distinguishing between a target having 18 nucleotides from an off-target of 18 nucleotides having 1, 2, or 3 mismatches). Accordingly, in some embodiments, the degree of complementarity between a guide sequence and its corresponding target sequence is greater than 94.5%, 95%, 95.5%, 96%, 96.5%, 97%, 97.5%, 98%, 98.5%, 99%, 99.5%, or 99.9%. In some embodiments, the degree of complementarity is 100%.

[0358] It is known in the field that complete complementarity is not required, provided there is sufficient complementarity to be functional. Modulations of cleavage efficiency can be exploited by introduction of mismatches, e.g., one or more mismatches, such as 1 or 2 mismatches between spacer sequence and target sequence, including the position of the mismatch along the spacer/target. The more central (i.e., not at the 3′ or 5′-ends) a mismatch, e.g., a double mismatch, is located; the more cleavage efficiency is affected. Accordingly, by choosing mismatch positions along the spacer sequence, cleavage efficiency can be modulated. For example, if less than 100% cleavage of targets is desired (e.g., in a cell population), 1 or 2 mismatches between spacer and target sequence can be introduced in the spacer sequences.

[0359] Type VI CRISPR-Cas effectors have been demonstrated to employ more than one RNA guide, thus enabling the ability of these effectors, and systems and complexes that include them, to target multiple nucleic acids. In some embodiments, the CRISPR systems comprising the engineered Class 2 type VI Cas13 protein, such as those either substantially lacking or having enhanced collateral activity, as described herein, include multiple RNA guides (e.g., two, three, four, five, six, seven, eight, nine, ten, fifteen, twenty, thirty, forty, or more) RNA guides. In some embodiments, the CRISPR systems described herein include a single RNA strand or a nucleic acid encoding a single RNA strand, wherein the RNA guides are arranged in tandem. The single RNA strand can include multiple copies of the same RNA guide, multiple copies of distinct RNA guides, or combinations thereof. The processing capability of the Type VI-E and VI-F CRISPR-Cas effector proteins described herein enables these effectors to be able to target multiple target nucleic acids (e.g., target RNAs) without a loss of activity. In some embodiments, the Type VI-E and VI-F CRISPR-Cas effector proteins may be delivered in complex with multiple RNA guides directed to different target RNA. In some embodiments, the engineered Class 2 type VI Cas13 protein, such as those either substantially lacking or having enhanced collateral activity may be co-delivered with multiple RNA guides, each specific for a different target nucleic acid. Methods of multiplexing using CRISPR-associated proteins are described, for example, in U.S. Pat. No. 9,790,490 B2, and EP3009511 B1, the entire contents of each of which are expressly incorporated herein by reference.

[0360] The spacer length of crRNAs can range from about 10-50 nucleotides, such as 15-50 nucleotides, 20-50 nucleotides, 25-50 nucleotide, or 19-50 nucleotides. In some embodiments, the spacer length of a guide RNA is at least 16 nucleotides, at least 17 nucleotides, at least 18 nucleotides, at least 19 nucleotides, at least 20 nucleotides, at least 21 nucleotides, or at least 22 nucleotides. In some embodiments, the spacer length is from 15 to 17 nucleotides (e.g., 15, 16, or 17 nucleotides), from 17 to 20 nucleotides (e.g., 17, 18, 19, or 20 nucleotides), from 20 to 24 nucleotides (e.g., 20, 21, 22, 23, or 24 nucleotides), from 23 to 25 nucleotides (e.g., 23, 24, or 25 nucleotides), from 24 to 27 nucleotides, from 27 to 30 nucleotides, from 30 to 45 nucleotides (e.g., 30, 31, 32, 33, 34, 35, 36, 37, 38, 39, 40, 41, 42, 43, 44, or 45 nucleotides), from 30 or 35 to 40 nucleotides, from 41 to 45 nucleotides, from 45 to 50 nucleotides (e.g., 45, 46, 47, 48, 49, or 50 nucleotides), or longer. In some embodiments, the spacer length is from about 15 to about 42 nucleotides.

[0361] In some embodiments, the direct repeat length of the guide RNA is 15-36 nucleotides, is at least 16 nucleotides, is from 16 to 20 nucleotides (e.g., 16, 17, 18, 19, or 20 nucleotides), is from 20-30 nucleotides (e.g., 20, 21, 22, 23, 24, 25, 26, 27, 28, 29, or 30 nucleotides), is from 30-40 nucleotides (e.g., 30, 31, 32, 33, 34, 35, 36, 37, 38, 39, or 40 nucleotides), or is about 36 nucleotides (e.g., 33, 34, 35, 36, 37, 38, or 39 nucleotides). In some embodiments, the direct repeat length of the guide RNA is 36 nucleotides.

[0362] In some embodiments, the overall length of the crRNA/guide RNA is about 36 nucleotides longer than any one of the spacer sequence length described herein above. For example, the overall length of the crRNA/guide RNA may be between 45-86 nucleotides, or 60-86 nucleotides, 62-86 nucleotides, or 63-86 nucleotides.

[0363] The crRNA sequences can be modified in a manner that allows for formation of a complex between the crRNA and the engineered Class 2 type VI Cas13 protein, such as those either substantially lacking or having enhanced collateral activity, and successful binding to the target, while at the same time not allowing for successful nuclease activity (i.e., without nuclease activity/without causing indels). These modified guide sequences are referred to as “dead crRNAs,” “dead guides,” or “dead guide sequences.” These dead guides or dead guide sequences may be catalytically inactive or conformationally inactive with regard to nuclease activity. Dead guide sequences are typically shorter than respective guide sequences that result in active RNA cleavage. In some embodiments, dead guides are 5%, 10%, 20%, 30%, 40%, or 50%, shorter than respective guide RNAs that have nuclease activity. Dead guide sequences of guide RNAs can be from 13 to 15 nucleotides in length (e.g., 13, 14, or 15 nucleotides in length), from 15 to 19 nucleotides in length, or from 17 to 18 nucleotides in length (e.g., 17 nucleotides in length).

[0364] Thus, in one aspect, the disclosure provides non-naturally occurring or engineered CRISPR systems including a functional engineered Class 2 type VI Cas13 protein, such as those either substantially lacking or having enhanced collateral activity as described herein, and a crRNA, wherein the crRNA comprises a dead crRNA sequence whereby the crRNA is capable of hybridizing to a target sequence such that the CRISPR system is directed to a target RNA of interest in a cell without detectable nuclease activity (e.g., RNase activity).

[0365] A detailed description of dead guides is described, e.g., in International Publication No. WO 2016/094872, which is incorporated herein by reference in its entirety.

[0366] Guide RNAs (e.g., crRNAs) can be generated as components of inducible systems. The inducible nature of the systems allows for spatio-temporal control of gene editing or gene expression. In some embodiments, the stimuli for the inducible systems include, e.g., electromagnetic radiation, sound energy, chemical energy, and/or thermal energy.

[0367] In some embodiments, the transcription of guide RNA (e.g., crRNA) can be modulated by inducible promoters, e.g., tetracycline or doxycycline controlled transcriptional activation (Tet-On and Tet-Off expression systems), hormone inducible gene expression systems (e.g., ecdysone inducible gene expression systems), and arabinose-inducible gene expression systems. Other examples of inducible systems include, e.g., small molecule two-hybrid transcription activations systems (FKBP, ABA, etc.), light inducible systems (Phytochrome, LOV domains, or cryptochrome), or Light Inducible Transcriptional Effector (LITE). These inducible systems are described, e.g., in WO 2016205764 and U.S. Pat. No. 8,795,965, both of which are incorporated herein by reference in the entirety.

[0368] Chemical modifications can be applied to the crRNA's phosphate backbone, sugar, and/or base. Backbone modifications such as phosphorothioates modify the charge on the phosphate backbone and aid in the delivery and nuclease resistance of the oligonucleotide (see, e.g., Eckstein, “Phosphorothioates, essential components of therapeutic oligonucleotides,” Nucl. Acid Ther., 24, pp. 374-387, 2014); modifications of sugars, such as 2′-O-methyl (2′-OMe), 2′-F, and locked nucleic acid (LNA), enhance both base pairing and nuclease resistance (see, e.g., Allerson et al. “Fully 2′-modified oligonucleotide duplexes with improved in vitro potency and stability compared to unmodified small interfering RNA,” J. Med. Chem. 48.4: 901-904, 2005). Chemically modified bases such as 2-thiouridine or N6-methyladenosine, among others, can allow for either stronger or weaker base pairing (see, e.g., Bramsen et al., “Development of therapeutic-grade small interfering RNAs by chemical engineering,” Front. Genet., 2012 Aug. 20; 3:154). Additionally, RNA is amenable to both 5′ and 3′ end conjugations with a variety of functional moieties including fluorescent dyes, polyethylene glycol, or proteins.

[0369] A wide variety of modifications can be applied to chemically synthesized crRNA molecules. For example, modifying an oligonucleotide with a 2′-OMe to improve nuclease resistance can change the binding energy of Watson-Crick base pairing. Furthermore, a 2′-OMe modification can affect how the oligonucleotide interacts with transfection reagents, proteins or any other molecules in the cell. The effects of these modifications can be determined by empirical testing.

[0370] In some embodiments, the crRNA includes one or more phosphorothioate modifications. In some embodiments, the crRNA includes one or more locked nucleic acids for the purpose of enhancing base pairing and/or increasing nuclease resistance.

[0371] A summary of these chemical modifications can be found, e.g., in Kelley et al., “Versatility of chemically synthesized guide RNAs for CRISPR-Cas9 genome editing,” J. Biotechnol. 233:74-83, 2016; WO 2016205764; and U.S. Pat. No. 8,795,965 B2; each which is incorporated by reference in its entirety.

[0372] The sequences and the lengths of the RNA guides (e.g., crRNAs) described herein can be optimized. In some embodiments, the optimized length of an RNA guide can be determined by identifying the processed form of crRNA (i.e., a mature crRNA), or by empirical length studies for crRNA tetraloops.

[0373] The crRNAs can also include one or more aptamer sequences. Aptamers are oligonucleotide or peptide molecules have a specific three-dimensional structure and can bind to a specific target molecule. The aptamers can be specific to gene effectors, gene activators, or gene repressors. In some embodiments, the aptamers can be specific to a protein, which in turn is specific to and recruits and/or binds to specific gene effectors, gene activators, or gene repressors. The effectors, activators, or repressors can be present in the form of fusion proteins. In some embodiments, the guide RNA has two or more aptamer sequences that are specific to the same adaptor proteins. In some embodiments, the two or more aptamer sequences are specific to different adaptor proteins. The adaptor proteins can include, e.g., MS2, PP7, Qβ, F2, GA, fr, JP501, M12, R17, BZ13, JP34, JP500, KU1, M11, MX1, TW18, VK, SP, FI, ID2, NL95, TW19, AP205, ϕkCb5, ϕkCb8r, ϕkCb12r, ϕkCb23r, 7s, and PRR1. Accordingly, in some embodiments, the aptamer is selected from binding proteins specifically binding any one of the adaptor proteins as described herein. In some embodiments, the aptamer sequence is a MS2 binding loop (SEQ ID NO: 95). In some embodiments, the aptamer sequence is a QBeta binding loop (SEQ ID NO: 96). In some embodiments, the aptamer sequence is a PP7 binding loop (SEQ ID NO: 97). A detailed description of aptamers can be found, e.g., in Nowak et al., “Guide RNA engineering for versatile Cas9 functionality,” Nucl. Acid. Res., 44(20):9555-9564, 2016; and WO 2016205764, which are incorporated herein by reference in their entirety.

[0374] In certain embodiments, the methods make use of chemically modified guide RNAs. Examples of guide RNA chemical modifications include, without limitation, incorporation of 2′-O-methyl (M), 2′-O-methyl 3′-phosphorothioate (MS), or 2′-O-methyl 3′-thioPACE (MSP) at one or more terminal nucleotides. Such chemically modified guide RNAs can comprise increased stability and increased activity as compared to unmodified guide RNAs, though on-target vs. off-target specificity is not predictable. See, Hendel, Nat Biotechnol. 33(9):985-9, 2015, incorporated by reference). Chemically modified guide RNAs may further include, without limitation, RNAs with phosphorothioate linkages and locked nucleic acid (LNA) nucleotides comprising a methylene bridge between the 2′ and 4′ carbons of the ribose ring.

[0375] The invention also encompasses methods for delivering multiple nucleic acid components, wherein each nucleic acid component is specific for a different target locus of interest thereby modifying multiple target loci of interest. The nucleic acid component of the complex may comprise one or more protein-binding RNA aptamers. The one or more aptamers may be capable of binding a bacteriophage coat protein. The bacteriophage coat protein may be selected from the group comprising Qβ, F2, GA, fr, JP501, MS2, M12, R17, BZ13, JP34, JP500, KU1, M11, MX1, TW18, VK, SP, FI, ID2, NL95, TW19, AP205, ϕCb5, ϕCb8r, ϕCb12r, ϕCb23r, 7s and PRR1. In certain embodiments, the bacteriophage coat protein is MS2.

### 5. Target RNA

[0376] The target RNA can be any RNA molecule of interest, including naturally-occurring and engineered RNA molecules. The target RNA can be an mRNA, a tRNA, a ribosomal RNA (rRNA), a microRNA (miRNA), an interfering RNA (siRNA), a ribozyme, a riboswitch, a satellite RNA, a microswitch, a microzyme, or a viral RNA.

[0377] In some embodiments, the target nucleic acid is associated with a condition or disease (e.g., an infectious disease or a cancer).

[0378] Thus, in some embodiments, the systems described herein can be used to treat a condition or disease by targeting these nucleic acids. For instance, the target nucleic acid associated with a condition or disease may be an RNA molecule that is overexpressed in a diseased cell (e.g., a cancer or tumor cell). The target nucleic acid may also be a toxic RNA and/or a mutated RNA (e.g., an mRNA molecule having a splicing defect or a mutation). The target nucleic acid may also be an RNA that is specific for a particular microorganism (e.g., a pathogenic bacteria).

### 6. Complex and Cell

[0379] One aspect of the invention provides a complex of an engineered Class 2 type VI Cas13 protein, such as those either substantially lacking or having enhanced collateral activity, such as CRISPR/Cas13e or CRISPR/Cas13f complex, comprising (1) any of the engineered Class 2 type VI Cas13 protein, such as those either substantially lacking or having enhanced collateral activity (e.g., engineered Cas13e/Cas13f effector proteins, homologs, orthologs, fusions, derivative, conjugates, or functional fragments thereof as described herein), and (2) any of the guide RNA described herein, each including a spacer sequence designed to be at least partially complementary to a target RNA, and a DR sequence compatible with the engineered Class 2 type VI Cas13 protein, such as those either substantially lacking or having enhanced collateral activity (e.g., Cas13d, Cas13e/Cas13f effector proteins), homologs, orthologs, fusions, derivatives, conjugates, or functional fragments thereof.

[0380] In certain embodiments, the complex further comprises the target RNA bound by the guide RNA.

[0381] In a related aspect, the invention also provides a cell comprising any of the complex of the invention. In certain embodiments, the cell is a prokaryote. In certain embodiments, the cell is a eukaryote.

### 7. Methods of Using CRISPR Systems

[0382] The CRISPR/Cas systems having the engineered Cas13, e.g., an engineered Class 2 type VI Cas13 protein, such as those either substantially lacking or having enhanced collateral activity, as described herein, have a wide variety of utilities like the corresponding wild-type Cas13-based systems, including modifying (e.g., deleting, inserting, translocating, inactivating, or activating) a target polynucleotide or nucleic acid in a multiplicity of cell types. The CRISPR systems have a broad spectrum of applications in, e.g., tracking and labeling of nucleic acids, enrichment assays (extracting desired sequence from background), controlling interfering RNA or miRNA, detecting circulating tumor DNA, preparing next generation library, drug screening, disease diagnosis and prognosis, and treating various genetic disorders.

[0383] Certain engineered Cas13 effector enzymes, as described herein, have enhanced collateral effect compared to the wild-type, and thus may be better alternatives than the wild-type Cas13 effector enzymes for utilities that take advantage of the enhanced collateral activity, such as DNA/RNA detection (e.g., specific high sensitivity enzymatic reporter unlocking (SHERLOCK)). Such engineered Cas13 effector enzymes with enhanced collateral activity is within the scope of one aspect of the invention.

### RNA Detection

[0384] In one aspect, the CRISPR systems described herein can be used in RNA detection. As shown in the examples, wild-type Cas13 such as Cas13e of the invention exhibit non-specific/collateral RNase activity upon activation of its guide RNA-dependent specific RNase activity when the spacer sequence is about 30 nucleotides. Thus the engineered CRISPR-associated proteins of the invention with enhanced collateral activity (compared to the wild-type) can be reprogrammed with CRISPR RNAs (crRNAs) to provide a platform for specific RNA sensing. Further, by choosing specific spacer sequence length, and upon recognition of its RNA target, activated CRISPR-associated proteins engage in enhanced collateral cleavage of nearby non-targeted RNAs. This crRNA-programmed collateral cleavage activity allows the CRISPR systems to detect the presence of a specific RNA by triggering programmed cell death or by nonspecific degradation of labeled RNA.

[0385] The SHERLOCK method (Specific High Sensitivity Enzymatic Reporter UnLOCKing) provides an in vitro nucleic acid detection platform with attomolar sensitivity based on nucleic acid amplification and collateral cleavage of a reporter RNA, allowing for real-time detection of the target. To achieve signal detection, the detection can be combined with different isothermal amplification steps. For example, recombinase polymerase amplification (RPA) can be coupled with T7 transcription to convert amplified DNA to RNA for subsequent detection. The combination of amplification by RPA, T7 RNA polymerase transcription of amplified DNA to RNA, and detection of target RNA by collateral RNA cleavage-mediated release of reporter signal is referred as SHERLOCK. Methods of using CRISPR in SHERLOCK are described in detail, e.g., in Gootenberg, et al. “Nucleic acid detection with CRISPR-Cas13a/C2c2,” Science, 2017 Apr. 28; 356(6336):438-442, which is incorporated herein by reference in its entirety.

[0386] The invention described herein provides mutant/variant Class 2, Type VI CRISPR/Cas effector enzymes, especially Type VI-D, -E, and -F Cas mutants/variants having enhanced collateral effect, such that they can be more effective in nucleic acid detection assays based on the collateral effect, such as the SHERLOCK assay. Such mutants include any one described in Examples 1, 2, 4, and 5, as well as FIGS. 6, 7, 9-14, 17D, 17E, 19C, and 19D, having at least 80%, 85%, or 87.5% or more collateral cleavage efficiency, and optionally better gRNA-guided cleavage compared to a corresponding wild-type Cas13.

[0387] In certain embodiments, such Cas13 mutants have enhanced collateral effect comprises, consists essentially of, or consists of a mutation corresponding to the N2-Y142A, N4-Y193A, N12-Y604A, or N21V7 mutation of Cas13d, or to the M14V2, M16V3, M18V1, M19-G712A, M19-T725A, or M19-C727A mutation of Cas13e.

[0388] The CRISPR-associated proteins can be used in Northern blot assays, which use electrophoresis to separate RNA samples by size. The CRISPR-associated proteins can be used to specifically bind and detect the target RNA sequence. The CRISPR-associated proteins can also be fused to a fluorescent protein (e.g., GFP) and used to track RNA localization in living cells. More particularly, the CRISPR-associated proteins can be inactivated in that they no longer cleave RNAs as described above. Thus, CRISPR-associated proteins can be used to determine the localization of the RNA or specific splice variants, the level of mRNA transcripts, up- or down-regulation of transcripts and disease-specific diagnosis. The CRISPR-associated proteins can be used for visualization of RNA in (living) cells using, for example, fluorescent microscopy or flow cytometry, such as fluorescence-activated cell sorting (FACS), which allows for high-throughput screening of cells and recovery of living cells following cell sorting. A detailed description regarding how to detect DNA and RNA can be found, e.g., in International Publication No. WO 2017/070605, which is incorporated herein by reference in its entirety.

[0389] In some embodiments, the CRISPR systems described herein can be used in multiplexed error-robust fluorescence in situ hybridization (MERFISH). These methods are described in, e.g., Chen et al., “Spatially resolved, highly multiplexed RNA profiling in single cells,” Science, 2015 Apr. 24; 348(6233):aaa6090, which is incorporated herein by reference herein in its entirety.

[0390] In some embodiments, the CRISPR systems described herein can be used to detect a target RNA in a sample (e.g., a clinical sample, a cell, or a cell lysate). The collateral RNase activity of the engineered Cas13, e.g., Type VI-E and/or VI-F CRISPR-Cas effector proteins described herein, is activated when the effector proteins bind to a target nucleic acid when the spacer sequence is of a specific chosen length (such as about 30 nucleotides). Upon binding to the target RNA of interest, the effector protein cleaves a labeled detector RNA to generate a signal (e.g., an increased signal or a decreased signal) thereby allowing for the qualitative and quantitative detection of the target RNA in the sample. The specific detection and quantification of RNA in the sample allows for a multitude of applications including diagnostics. In some embodiments, the methods include contacting a sample with: i) an RNA guide (e.g., crRNA) and/or a nucleic acid encoding the RNA guide, wherein the RNA guide consists of a direct repeat sequence and a spacer sequence capable of hybridizing to the target RNA; (ii) an engineered Class 2 type VI Cas13 protein with enhanced collateral activity compared to wild-type Cas13, such as a subject engineered Type VI-E or VI-F CRISPR-Cas effector protein (Cas13e or Cas13f) and/or a nucleic acid encoding the effector protein; and (iii) a labeled detector RNA; wherein the effector protein associates with the RNA guide to form a complex; wherein the RNA guide hybridizes to the target RNA; and wherein upon binding of the complex to the target RNA, the effector protein exhibits collateral RNase activity and cleaves the labeled detector RNA; and b) measuring a detectable signal produced by cleavage of the labeled detector RNA, wherein said measuring provides for detection of the single-stranded target RNA in the sample. In some embodiments, the methods further comprise comparing the detectable signal with a reference signal and determining the amount of target RNA in the sample.

[0391] In some embodiments, the measuring is performed using gold nanoparticle detection, fluorescence polarization, colloid phase transition/dispersion, electrochemical detection, and semiconductor based-sensing. In some embodiments, the labeled detector RNA includes a fluorescence-emitting dye pair, a fluorescence resonance energy transfer (FRET) pair, or a quencher/fluor pair. In some embodiments, upon cleavage of the labeled detector RNA by the effector protein, an amount of detectable signal produced by the labeled detector RNA is decreased or increased. In some embodiments, the labeled detector RNA produces a first detectable signal prior to cleavage by the effector protein and a second detectable signal after cleavage by the effector protein. In some embodiments, a detectable signal is produced when the labeled detector RNA is cleaved by the effector protein. In some embodiments, the labeled detector RNA comprises a modified nucleobase, a modified sugar moiety, a modified nucleic acid linkage, or a combination thereof. In some embodiments, the methods include the multi-channel detection of multiple independent target RNAs in a sample (e.g., two, three, four, five, six, seven, eight, nine, ten, fifteen, twenty, thirty, forty, or more target RNAs) by using multiple engineered Cas13, such as the engineered Type VI-E and/or VI-F CRISPR-Cas (Cas13e and/or Cas130 systems of the invention, each including a distinct orthologous effector protein and corresponding RNA guides, allowing for the differentiation of multiple target RNAs in the sample. In some embodiments, the methods include the multi-channel detection of multiple independent target RNAs in a sample, with the use of multiple instances of engineered Cas13, such as engineered Type VI-E and/or VI-F CRISPR-Cas systems of the invention, each containing an orthologous effector protein with differentiable collateral RNase substrates. Methods of detecting an RNA in a sample using CRISPR-associated proteins are described, for example, in U.S. Patent Publication No. 2017/0362644, the entire contents of which are incorporated herein by reference.

### Tracking and Labeling of Nucleic Acids

[0392] Cellular processes depend on a network of molecular interactions among proteins, RNAs, and DNAs. Accurate detection of protein-DNA and protein-RNA interactions is key to understanding such processes. In vitro proximity labeling techniques employ an affinity tag combined with, a reporter group, e.g., a photoactivatable group, to label polypeptides and RNAs in the vicinity of a protein or RNA of interest in vitro. After UV irradiation, the photoactivatable groups react with proteins and other molecules that are in close proximity to the tagged molecules, thereby labelling them. Labelled interacting molecules can subsequently be recovered and identified. The CRISPR-associated proteins can for instance be used to target probes to selected RNA sequences. These applications can also be applied in animal models for in vivo imaging of diseases or difficult-to culture cell types. The methods of tracking and labeling of nucleic acids are described, e.g., in U.S. Pat. No. 8,795,965, WO 2016205764, and WO 2017070605; each of which is incorporated herein by reference herein in its entirety.

RNA Isolation, Purification, Enrichment, and/or Depletion

[0393] The CRISPR systems (e.g., CRISPR-associated proteins) described herein can be used to isolate and/or purify the RNA. The CRISPR-associated proteins can be fused to an affinity tag that can be used to isolate and/or purify the RNA-CRISPR-associated protein complex. These applications are useful, e.g., for the analysis of gene expression profiles in cells.

[0394] In some embodiments, the CRISPR-associated proteins can be used to target a specific noncoding RNA (ncRNA) thereby blocking its activity. In some embodiments, the CRISPR-associated proteins can be used to specifically enrich a particular RNA (including but not limited to increasing stability, etc.), or alternatively, to specifically deplete a particular RNA (e.g., particular splice variants, isoforms, etc.).

[0395] These methods are described, e.g., in U.S. Pat. No. 8,795,965, WO 2016205764, and WO 2017070605; each of which is incorporated herein by reference herein in its entirety.

### High-Throughput Screening

[0396] The CRISPR systems described herein can be used for preparing next generation sequencing (NGS) libraries. For example, to create a cost-effective NGS library, the CRISPR systems can be used to disrupt the coding sequence of a target gene product, and the CRISPR-associated protein transfected clones can be screened simultaneously by next-generation sequencing (e.g., on the Ion Torrent PGM system). A detailed description regarding how to prepare NGS libraries can be found, e.g., in Bell et al., “A high-throughput screening strategy for detecting CRISPR-Cas9 induced mutations using next-generation sequencing,” BMC Genomics, 15.1 (2014): 1002, which is incorporated herein by reference in its entirety.

### Engineered Microorganisms

[0397] Microorganisms (e.g., E. coli, yeast, and microalgae) are widely used for synthetic biology. The development of synthetic biology has a wide utility, including various clinical applications. For example, the programmable CRISPR systems can be used to split proteins of toxic domains for targeted cell death, e.g., using cancer-linked RNA as target transcript. Further, pathways involving protein-protein interactions can be influenced in synthetic biological systems with, e.g., fusion complexes with the appropriate effectors such as kinases or enzymes.

[0398] In some embodiments, crRNAs that target phage sequences can be introduced into the microorganism. Thus, the disclosure also provides methods of vaccinating a microorganism (e.g., a production strain) against phage infection.

[0399] In some embodiments, the CRISPR systems provided herein can be used to engineer microorganisms, e.g., to improve yield or improve fermentation efficiency. For example, the CRISPR systems described herein can be used to engineer microorganisms, such as yeast, to generate biofuel or biopolymers from fermentable sugars, or to degrade plant-derived lignocellulose derived from agricultural waste as a source of fermentable sugars. More particularly, the methods described herein can be used to modify the expression of endogenous genes required for biofuel production and/or to modify endogenous genes, which may interfere with the biofuel synthesis. These methods of engineering microorganisms are described e.g., in Verwaal et al., “CRISPR/Cpf1 enables fast and simple genome editing of Saccharomyces cerevisiae,” Yeast doi: 10.1002/yea.3278, 2017; and Hlavova et al., “Improving microalgae for biotechnology-from genetics to synthetic biology,” Biotechnol. Adv., 33:1194-203, 2015, both of which are incorporated herein by reference in the entirety.

[0400] In some embodiments, the CRISPR systems provided herein can be used to induce death or dormancy of a cell (e.g., a microorganism such as an engineered microorganism). These methods can be used to induce dormancy or death of a multitude of cell types including prokaryotic and eukaryotic cells, including, but not limited to mammalian cells (e.g., cancer cells, or tissue culture cells), protozoans, fungal cells, cells infected with a virus, cells infected with an intracellular bacteria, cells infected with an intracellular protozoan, cells infected with a prion, bacteria (e.g., pathogenic and non-pathogenic bacteria), protozoans, and unicellular and multicellular parasites. For instance, in the field of synthetic biology it is highly desirable to have mechanisms of controlling engineered microorganisms (e.g., bacteria) in order to prevent their propagation or dissemination. The systems described herein can be used as “kill-switches” to regulate and/or prevent the propagation or dissemination of an engineered microorganism. Further, there is a need in the art for alternatives to current antibiotic treatments. The systems described herein can also be used in applications where it is desirable to kill or control a specific microbial population (e.g., a bacterial population). For example, the systems described herein may include an RNA guide (e.g., a crRNA) that targets a nucleic acid (e.g., an RNA) that is genus-, species-, or strain-specific, and can be delivered to the cell. Upon complexing and binding to the target nucleic acid, the collateral RNase activity of the Type VI-E and/or VI-F CRISPR-Cas effector proteins is activated leading to the cleavage of non-target RNA within the microorganisms, ultimately resulting in dormancy or death. In some embodiments, the methods comprise contacting the cell with a system described herein including a Type VI-E and/or VI-F CRISPR-Cas effector proteins or a nucleic acid encoding the effector protein, and a RNA guide (e.g., a crRNA) or a nucleic acid encoding the RNA guide, wherein the spacer sequence is complementary to at least 15 nucleotides (e.g., 16, 17, 18, 19, 20, 21, 22, 23, 24, 25, 26, 27, 28, 29, 30, 35, 40, 45, 50 or more nucleotides) of a target nucleic acid (e.g., a genus-, strain-, or species-specific RNA guide). Without wishing to be bound by any particular theory, the cleavage of non-target RNA by the Type VI-E and/or VI-F CRISPR-Cas effector proteins may induce programmed cell death, cell toxicity, apoptosis, necrosis, necroptosis, cell death, cell cycle arrest, cell anergy, a reduction of cell growth, or a reduction in cell proliferation. For example, in bacteria, the cleavage of non-target RNA by the Type VI-E and/or VI-F CRISPR-Cas effector proteins may be bacteriostatic or bactericidal.

### Application in Plants

[0401] The CRISPR systems described herein have a wide variety of utility in plants. In some embodiments, the CRISPR systems can be used to engineer transcriptome of plants (e.g., improving production, making products with desired post-translational modifications, or introducing genes for producing industrial products). In some embodiments, the CRISPR systems can be used to introduce a desired trait to a plant (e.g., without heritable modifications to the genome), or regulate expression of endogenous genes in plant cells or whole plants.

[0402] In some embodiments, the CRISPR systems can be used to identify, edit, and/or silence genes encoding specific proteins, e.g., allergenic proteins (e.g., allergenic proteins in peanuts, soybeans, lentils, peas, green beans, and mung beans). A detailed description regarding how to identify, edit, and/or silence genes encoding proteins is described, e.g., in Nicolaou et al., “Molecular diagnosis of peanut and legume allergy,” Curr. Opin. Allergy Clin. Immunol. 11(3):222-8, 2011, and WO 2016205764 A1; both of which are incorporated herein by reference in the entirety.

### Pooled-Screening

[0403] As described herein, pooled CRISPR screening is a powerful tool for identifying genes involved in biological mechanisms such as cell proliferation, drug resistance, and viral infection. Cells are transduced in bulk with a library of guide RNA (gRNA)-encoding vectors described herein, and the distribution of gRNAs is measured before and after applying a selective challenge. Pooled CRISPR screens work well for mechanisms that affect cell survival and proliferation, and they can be extended to measure the activity of individual genes (e.g., by using engineered reporter cell lines). Arrayed CRISPR screens, in which only one gene is targeted at a time, make it possible to use RNA-seq as the readout. In some embodiments, the CRISPR systems as described herein can be used in single-cell CRISPR screens. A detailed description regarding pooled CRISPR screenings can be found, e.g., in Datlinger et al., “Pooled CRISPR screening with single-cell transcriptome read-out,” Nat. Methods. 14(3):297-301, 2017, which is incorporated herein by reference in its entirety.

### Saturation Mutagenesis (Bashing)

[0404] The CRISPR systems described herein can be used for in situ saturating mutagenesis. In some embodiments, a pooled guide RNA library can be used to perform in situ saturating mutagenesis for particular genes or regulatory elements. Such methods can reveal critical minimal features and discrete vulnerabilities of these genes or regulatory elements (e.g., enhancers). These methods are described, e.g., in Canver et al., “BCL11A enhancer dissection by Cas9-mediated in situ saturating mutagenesis,” Nature 527(7577):192-7, 2015, which is incorporated herein by reference in its entirety.

### RNA-Related Applications

[0405] The CRISPR systems described herein can have various RNA-related applications, e.g., modulating gene expression, degrading a RNA molecule, inhibiting RNA expression, screening RNA or RNA products, determining functions of lincRNA or non-coding RNA, inducing cell dormancy, inducing cell cycle arrest, reducing cell growth and/or cell proliferation, inducing cell anergy, inducing cell apoptosis, inducing cell necrosis, inducing cell death, and/or inducing programmed cell death. A detailed description of these applications can be found, e.g., in WO 2016/205764 A1, which is incorporated herein by reference in its entirety. In different embodiments, the methods described herein can be performed in vitro, in vivo, or ex vivo.

[0406] For example, the CRISPR systems described herein can be administered to a subject having a disease or disorder to target and induce cell death in a cell in a diseased state (e.g., cancer cells or cells infected with an infectious agent). For instance, in some embodiments, the CRISPR systems described herein can be used to target and induce cell death in a cancer cell, wherein the cancer cell is from a subject having a Wilms' tumor, Ewing sarcoma, a neuroendocrine tumor, a glioblastoma, a neuroblastoma, a melanoma, skin cancer, breast cancer, colon cancer, rectal cancer, prostate cancer, liver cancer, renal cancer, pancreatic cancer, lung cancer, biliary cancer, cervical cancer, endometrial cancer, esophageal cancer, gastric cancer, head and neck cancer, medullary thyroid carcinoma, ovarian cancer, glioma, lymphoma, leukemia, myeloma, acute lymphoblastic leukemia, acute myelogenous leukemia, chronic lymphocytic leukemia, chronic myelogenous leukemia, Hodgkin's lymphoma, non-Hodgkin's lymphoma, or urinary bladder cancer.

### Modulating Gene Expression

[0407] The CRISPR systems described herein can be used to modulate gene expression. The CRISPR systems can be used, together with suitable guide RNAs, to target gene expression, via control of RNA processing. The control of RNA processing can include, e.g., RNA processing reactions such as RNA splicing (e.g., alternative splicing), viral replication, and tRNA biosynthesis. The RNA targeting proteins in combination with suitable guide RNAs can also be used to control RNA activation (RNAa). RNA activation is a small RNA-guided and Argonaute (Ago)-dependent gene regulation phenomenon in which promoter-targeted short double-stranded RNAs (dsRNAs) induce target gene expression at the transcriptional/epigenetic level. RNAa leads to the promotion of gene expression, so control of gene expression may be achieved that way through disruption or reduction of RNAa. In some embodiments, the methods include the use of the RNA targeting CRISPR as substitutes for e.g., interfering ribonucleic acids (such as siRNAs, shRNAs, or dsRNAs). The methods of modulating gene expression are described, e.g., in WO 2016205764, which is incorporated herein by reference in its entirety.

### Controlling RNA Interference

[0408] Control over interfering RNAs or microRNAs (miRNA) can help reduce off-target effects by reducing the longevity of the interfering RNAs or miRNAs in vivo or in vitro. In some embodiments, the target RNAs can include interfering RNAs, i.e., RNAs involved in the RNA interference pathway, such as small hairpin RNAs (shRNAs), small interfering (siRNAs), etc. In some embodiments, the target RNAs include, e.g., miRNAs or double stranded RNAs (dsRNA).

[0409] In some embodiments, if the RNA targeting protein and suitable guide RNAs are selectively expressed (for example spatially or temporally under the control of a regulated promoter, for example a tissue- or cell cycle-specific promoter and/or enhancer), this can be used to protect the cells or systems (in vivo or in vitro) from RNA interference (RNAi) in those cells. This may be useful in neighboring tissues or cells where RNAi is not required or for the purposes of comparison of the cells or tissues where the CRISPR-associated proteins and suitable crRNAs are and are not expressed (i.e., where the RNAi is not controlled and where it is, respectively). The RNA targeting proteins can be used to control or bind to molecules comprising or consisting of RNAs, such as ribozymes, ribosomes, or riboswitches. In some embodiments, the guide RNAs can recruit the RNA targeting proteins to these molecules so that the RNA targeting proteins are able to bind to them. These methods are described, e.g., in WO 2016205764 and WO 2017070605, both of which are incorporated herein by reference in the entirety.

### Modifying Riboswitches and Controlling Metabolic Regulations

[0410] Riboswitches are regulatory segments of messenger RNAs that bind small molecules and in turn regulate gene expression. This mechanism allows the cell to sense the intracellular concentration of these small molecules. A specific riboswitch typically regulates its adjacent gene by altering the transcription, the translation or the splicing of this gene. Thus, in some embodiments, the riboswitch activity can be controlled by the use of the RNA targeting proteins in combination with suitable guide RNAs to target the riboswitches. This may be achieved through cleavage of, or binding to, the riboswitch. Methods of using CRISPR systems to control riboswitches are described, e.g., in WO 2016205764 and WO 2017070605, both of which are incorporated herein by reference in their entireties.

### RNA Modification

[0411] In some embodiments, the CRISPR-associated proteins described herein can be fused to a base-editing domain, such as ADAR1, ADAR2, APOBEC, or activation-induced cytidine deaminase (AID), and can be used to modify an RNA sequence (e.g., an mRNA). In some embodiments, the CRISPR-associated protein includes one or more mutations (e.g., in a catalytic domain), which renders the subject CRISPR-associated protein incapable of cleaving RNA (e.g., the dCas13 version of the engineered Class 2 type VI Cas13 protein described herein).

[0412] In some embodiments, such CRISPR-associated proteins can be used with an RNA-binding fusion polypeptide comprising a base-editing domain (e.g., ADAR1, ADAR2, APOBEC, or AID) fused to an RNA-binding domain, such as MS2 (also known as MS2 coat protein), Qbeta (also known as Qbeta coat protein), or PP7 (also known as PP7 coat protein). The amino acid sequences of the RNA-binding domains MS2, Qbeta, and PP7 are provided below:

[0413] MS2 (MS2 coat protein) (SEQ ID NO: 98)

[0414] Qbeta (Qbeta coat protein) (SEQ ID NO: 99)

[0415] PP7 (PP7 coat protein) (SEQ ID NO: 100)

[0416] In some embodiments, the RNA binding domain can bind to a specific sequence (e.g., an aptamer sequence) or secondary structure motifs on a crRNA of the system described herein (e.g., when the crRNA is in an effector-crRNA complex), thereby recruiting the RNA binding fusion polypeptide (which has a base-editing domain) to the effector complex. For example, in some embodiments, the CRISPR system includes a CRISPR associated protein, a crRNA having an aptamer sequence (e.g., an MS2 binding loop, a QBeta binding loop, or a PP7 binding loop), and a RNA-binding fusion polypeptide having a base-editing domain fused to an RNA-binding domain that specifically binds to the aptamer sequence. In this system, the CRISPR-associated protein forms a complex with the crRNA having the aptamer sequence. Further the RNA-binding fusion polypeptide binds to the crRNA (via the aptamer sequence) thereby forming a tripartite complex that can modify a target RNA.

[0417] Methods of using CRISPR systems for base editing are described, e.g., in International Publication No. WO 2017/219027, which is incorporated herein by reference in its entirety, and in particular with respect to its discussion of RNA modification.

### RNA Splicing

[0418] In some embodiments, an inactivated or dCas13 version of the engineered Class 2 type VI Cas13 protein substantially lacking collateral activity described herein (e.g., an engineered CRISPR associated protein having one or more further mutations in a catalytic domain) can be used to target and bind to specific splicing sites on RNA transcripts. Binding of the inactivated CRISPR-associated protein to the RNA may sterically inhibit interaction of the spliceosome with the transcript, enabling alteration in the frequency of generation of specific transcript isoforms. Such method can be used to treat disease through exon skipping such that an exon having a mutation may be skipped in a mature protein. Methods of using CRISPR systems to alter splicing are described, e.g., in International Publication No. WO 2017/219027, which is incorporated herein by reference in its entirety, and in particular with respect to its discussion of RNA splicing.

### Therapeutic Applications

[0419] The CRISPR systems described herein can have various therapeutic applications. Such applications may be based on one or more of the abilities below, both in vitro and in vivo, of the subject engineered Cas13, e.g., engineered CRISPR/Cas13e or Cas13f systems: induce cellular senescence, induce cell cycle arrest, inhibit cell growth and/or proliferation, induce apoptosis, induce necrosis, etc.

[0420] In some embodiments, the new engineered CRISPR systems can be used to treat various diseases and disorders, e.g., genetic disorders (e.g., monogenetic diseases), diseases that can be treated by nuclease activity (e.g., Pcsk9 targeting, Duchenne Muscular Dystrophy (DMD), BCL11a targeting), and various cancers, etc.

[0421] In some embodiments, the CRISPR systems described herein can be used to edit a target nucleic acid to modify the target nucleic acid (e.g., by inserting, deleting, or mutating one or more nucleic acid residues).

[0422] In one aspect, the CRISPR systems described herein can be used for treating a disease caused by overexpression of RNAs, toxic RNAs, and/or mutated RNAs (e.g., splicing defects or truncations). For example, expression of toxic RNAs may be associated with the formation of nuclear inclusions and late-onset degenerative changes in brain, heart, or skeletal muscle. In some embodiments, the disorder is myotonic dystrophy. In myotonic dystrophy, the main pathogenic effect of the toxic RNAs is to sequester binding proteins and compromise the regulation of alternative splicing (see, e.g., Osborne et al., “RNA-dominant diseases,” Hum. Mol. Genet., 2009 Apr. 15; 18(8):1471-81). Myotonic dystrophy (dystrophia myotonica (DM)) is of particular interest to geneticists because it produces an extremely wide range of clinical features. The classical form of DM, which is now called DM type 1 (DM1), is caused by an expansion of CTG repeats in the 3′-untranslated region (UTR) of DMPK, a gene encoding a cytosolic protein kinase. The CRISPR systems as described herein can target overexpressed RNA or toxic RNA, e.g., the DMPK gene or any of the mis-regulated alternative splicing in DM1 skeletal muscle, heart, or brain.

[0423] The CRISPR systems described herein can also target trans-acting mutations affecting RNA-dependent functions that cause various diseases such as, e.g., Prader Willi syndrome, Spinal muscular atrophy (SMA), and Dyskeratosis congenita. A list of diseases that can be treated using the CRISPR systems described herein is summarized in Cooper et al., “RNA and disease,” Cell, 136.4 (2009): 777-793, and WO 2016/205764 A1, both of which are incorporated herein by reference in the entirety. Those of skill in this field will understand how to use the new CRISPR systems to treat these diseases.

[0424] The CRISPR systems described herein can also be used in the treatment of various tauopathies, including, e.g., primary and secondary tauopathies, such as primary age-related tauopathy (PART)/Neurofibrillary tangle (NFT)-predominant senile dementia (with NFTs similar to those seen in Alzheimer Disease (AD), but without plaques), dementia pugilistica (chronic traumatic encephalopathy), and progressive supranuclear palsy. A useful list of tauopathies and methods of treating these diseases are described, e.g., in WO 2016205764, which is incorporated herein by reference in its entirety.

[0425] The CRISPR systems described herein can also be used to target mutations disrupting the cis-acting splicing codes that can cause splicing defects and diseases. These diseases include, e.g., motor neuron degenerative disease that results from deletion of the SMN1 gene (e.g., spinal muscular atrophy), Duchenne Muscular Dystrophy (DMD), frontotemporal dementia, and Parkinsonism linked to chromosome 17 (FTDP-17), and cystic fibrosis.

[0426] The CRISPR systems described herein can further be used for antiviral activity, in particular against RNA viruses. The CRISPR-associated proteins can target the viral RNAs using suitable guide RNAs selected to target viral RNA sequences.

[0427] The CRISPR systems described herein can also be used to treat a cancer in a subject (e.g., a human subject). For example, the CRISPR-associated proteins described herein can be programmed with crRNA targeting a RNA molecule that is aberrant (e.g., comprises a point mutation or are alternatively-spliced) and found in cancer cells to induce cell death in the cancer cells (e.g., via apoptosis).

[0428] The CRISPR systems described herein can also be used to treat an autoimmune disease or disorder in a subject (e.g., a human subject). For example, the CRISPR-associated proteins described herein can be programmed with crRNA targeting a RNA molecule that is aberrant (e.g., comprises a point mutation or are alternatively-spliced) and found in cells responsible for causing the autoimmune disease or disorder.

[0429] Further, the CRISPR systems described herein can also be used to treat an infectious disease in a subject. For example, the CRISPR-associated proteins described herein can be programmed with crRNA targeting a RNA molecule expressed by an infectious agent (e.g., a bacteria, a virus, a parasite or a protozoan) in order to target and induce cell death in the infectious agent cell. The CRISPR systems may also be used to treat diseases where an intracellular infectious agent infects the cells of a host subject. By programming the CRISPR-associated protein to target a RNA molecule encoded by an infectious agent gene, cells infected with the infectious agent can be targeted and cell death induced.

[0430] Furthermore, in vitro RNA sensing assays can be used to detect specific RNA substrates. The CRISPR-associated proteins can be used for RNA-based sensing in living cells. Examples of applications are diagnostics by sensing of, for examples, disease-specific RNAs.

[0431] A detailed description of therapeutic applications of the CRISPR systems described herein can be found, e.g., in U.S. Pat. No. 8,795,965, EP3009511, WO 2016205764, and WO 2017070605; each of which is incorporated herein by reference in its entirety.

### Cells and Progenies Thereof

[0432] In certain embodiments, the methods of the invention can be used to introduce the CRISPR systems described herein into a cell, and cause the cell and/or its progeny to alter the production of one or more cellular produces, such as antibody, starch, ethanol, or any other desired products. Such cells and progenies thereof are within the scope of the invention.

[0433] In certain embodiments, the methods and/or the CRISPR systems described herein lead to modification of the translation and/or transcription of one or more RNA products of the cells. For example, the modification may lead to increased transcription/translation/expression of the RNA product. In other embodiments, the modification may lead to decreased transcription/translation/expression of the RNA product.

[0434] In certain embodiments, the cell is a prokaryotic cell.

[0435] In certain embodiments, the cell is a eukaryotic cell, such as a mammalian cell, including a human cell (a primary human cell or an established human cell line). In certain embodiments, the cell is a non-human mammalian cell, such as a cell from a non-human primate (e.g., monkey), a cow/bull/cattle, sheep, goat, pig, horse, dog, cat, rodent (such as rabbit, mouse, rat, hamster, etc). In certain embodiments, the cell is from fish (such as salmon), bird (such as poultry bird, including chick, duck, goose), reptile, shellfish (e.g., oyster, claim, lobster, shrimp), insect, worm, yeast, etc. In certain embodiments, the cell is from a plant, such as monocot or dicot. In certain embodiment, the plant is a food crop such as barley, cassava, cotton, groundnuts or peanuts, maize, millet, oil palm fruit, potatoes, pulses, rapeseed or canola, rice, rye, sorghum, soybeans, sugar cane, sugar beets, sunflower, and wheat. In certain embodiment, the plant is a cereal (barley, maize, millet, rice, rye, sorghum, and wheat). In certain embodiment, the plant is a tuber (cassava and potatoes). In certain embodiment, the plant is a sugar crop (sugar beets and sugar cane). In certain embodiment, the plant is an oil-bearing crop (soybeans, groundnuts or peanuts, rapeseed or canola, sunflower, and oil palm fruit). In certain embodiment, the plant is a fiber crop (cotton). In certain embodiment, the plant is a tree (such as a peach or a nectarine tree, an apple or pear tree, a nut tree such as almond or walnut or pistachio tree, or a citrus tree, e.g., orange, grapefruit or lemon tree), a grass, a vegetable, a fruit, or an algae. In certain embodiment, the plant is a nightshade plant; a plant of the genus Brassica; a plant of the genus Lactuca; a plant of the genus Spinacia; a plant of the genus Capsicum; cotton, tobacco, asparagus, carrot, cabbage, broccoli, cauliflower, tomato, eggplant, pepper, lettuce, spinach, strawberry, blueberry, raspberry, blackberry, grape, coffee, cocoa, etc.

[0436] A related aspect provides cells or progenies thereof modified by the methods of the invention using the CRISPR systems described herein.

[0437] In certain embodiments, the cell is modified in vitro, in vivo, or ex vivo.

[0438] In certain embodiments, the cell is a stem cell.

### 8. Delivery

[0439] Through this disclosure and the knowledge in the art, the CRISPR systems described herein comprising an engineered Class 2 type VI Cas13 protein, such as those either substantially lacking or having enhanced collateral activity (such as Cas13e or Cas13f), or any of the components thereof described herein (Cas13 proteins, derivatives, functional fragments or the various fusions or adducts thereof, and guide RNA/crRNA), nucleic acid molecules thereof, and/or nucleic acid molecules encoding or providing components thereof, can be delivered by various delivery systems such as vectors, e.g., plasmids and viral delivery vectors, using any suitable means in the art. Such methods include (and are not limited to) electroporation, lipofection, microinjection, transfection, sonication, gene gun, etc.

[0440] In certain embodiments, the CRISPR-associated proteins and/or any of the RNAs (e.g., guide RNAs or crRNAs) and/or accessory proteins can be delivered using suitable vectors, e.g., plasmids or viral vectors, such as adeno-associated viruses (AAV), lentiviruses, adenoviruses, retroviral vectors, and other viral vectors, or combinations thereof. The proteins and one or more crRNAs can be packaged into one or more vectors, e.g., plasmids or viral vectors. For bacterial applications, the nucleic acids encoding any of the components of the CRISPR systems described herein can be delivered to the bacteria using a phage. Exemplary phages, include, but are not limited to, T4 phage, Mu, λ phage, T5 phage, T7 phage, T3 phage, Φ29, M13, MS2, Qβ, and Φ174.

[0441] In some embodiments, the vectors, e.g., plasmids or viral vectors, are delivered to the tissue of interest by, e.g., intramuscular injection, intravenous administration, transdermal administration, intranasal administration, oral administration, or mucosal administration. Such delivery may be either via a single dose, or multiple doses. One skilled in the art understands that the actual dosage to be delivered herein may vary greatly depending upon a variety of factors, such as the vector choices, the target cells, organisms, tissues, the general conditions of the subject to be treated, the degrees of transformation/modification sought, the administration routes, the administration modes, the types of transformation/modification sought, etc.

[0442] In certain embodiments, the delivery is via adenoviruses, which can be at a single dose containing at least 1×10⁵ particles (also referred to as particle units, pu) of adenoviruses. In some embodiments, the dose preferably is at least about 1×10⁶ particles, at least about 1×10⁷ particles, at least about 1×10⁸ particles, and at least about 1×10⁹ particles of the adenoviruses. The delivery methods and the doses are described, e.g., in WO 2016205764 A1 and U.S. Pat. No. 8,454,972 B2, both of which are incorporated herein by reference in the entirety.

[0443] In some embodiments, the delivery is via plasmids. The dosage can be a sufficient number of plasmids to elicit a response. In some cases, suitable quantities of plasmid DNA in plasmid compositions can be from about 0.1 to about 2 mg. Plasmids will generally include (i) a promoter; (ii) a sequence encoding a nucleic acid-targeting CRISPR-associated proteins and/or an accessory protein, each operably linked to a promoter (e.g., the same promoter or a different promoter); (iii) a selectable marker; (iv) an origin of replication; and (v) a transcription terminator downstream of and operably linked to (ii). The plasmids can also encode the RNA components of a CRISPR complex, but one or more of these may instead be encoded on different vectors. The frequency of administration is within the ambit of the medical or veterinary practitioner (e.g., physician, veterinarian), or a person skilled in the art.

[0444] In another embodiment, the delivery is via liposomes or lipofection formulations and the like, and can be prepared by methods known to those skilled in the art. Such methods are described, for example, in WO 2016205764 and U.S. Pat. Nos. 5,593,972; 5,589,466; and 5,580,859; each of which is incorporated herein by reference in its entirety.

[0445] In some embodiments, the delivery is via nanoparticles or exosomes. For example, exosomes have been shown to be particularly useful in delivery RNA.

[0446] Further means of introducing one or more components of the new CRISPR systems to the cell is by using cell penetrating peptides (CPP). In some embodiments, a cell penetrating peptide is linked to the CRISPR-associated proteins. In some embodiments, the CRISPR-associated proteins and/or guide RNAs are coupled to one or more CPPs to effectively transport them inside cells (e.g., plant protoplasts). In some embodiments, the CRISPR-associated proteins and/or guide RNA(s) are encoded by one or more circular or non-circular DNA molecules that are coupled to one or more CPPs for cell delivery.

[0447] CPPs are short peptides of fewer than 35 amino acids derived either from proteins or from chimeric sequences capable of transporting biomolecules across cell membrane in a receptor independent manner. CPPs can be cationic peptides, peptides having hydrophobic sequences, amphipathic peptides, peptides having proline-rich and anti-microbial sequences, and chimeric or bipartite peptides. Examples of CPPs include, e.g., Tat (which is a nuclear transcriptional activator protein required for viral replication by HIV type 1), penetratin, Kaposi fibroblast growth factor (FGF) signal peptide sequence, integrin β3 signal peptide sequence, polyarginine peptide Args sequence, Guanine rich-molecular transporters, and sweet arrow peptide. CPPs and methods of using them are described, e.g., in Hällbrink et al., “Prediction of cell-penetrating peptides,” Methods Mol. Biol., 2015; 1324:39-58; Ramakrishna et al., “Gene disruption by cell-penetrating peptide-mediated delivery of Cas9 protein and guide RNA,” Genome Res., 2014 June; 24(6):1020-7; and WO 2016205764 A1; each of which is incorporated herein by reference in its entirety.

[0448] Various delivery methods for the CRISPR systems described herein are also described, e.g., in U.S. Pat. No. 8,795,965, EP3009511, WO 2016205764, and WO 2017070605; each of which is incorporated herein by reference in its entirety.

### 9. Kits

[0449] Another aspect of the invention provides a kit, comprising any two or more components of the subject CRISPR/Cas system described herein comprising an engineered Class 2 type VI Cas13 protein, such as those either substantially lacking or having enhanced collateral activity, such as the Cas13e and Cas13f proteins, derivatives, functional fragments or the various fusions or adducts thereof, guide RNA/crRNA, complexes thereof, vectors encompassing the same, or host encompassing the same.

[0450] In certain embodiments, the kit further comprises an instruction to use the components encompassed therein, and/or instructions for combining with additional components that may be available elsewhere.

[0451] In certain embodiments, the kit further comprises one or more nucleotides, such as nucleotide(s) corresponding to those useful to insert the guide RNA coding sequence into a vector and operably linking the coding sequence to one or more control elements of the vector.

[0452] In certain embodiments, the kit further comprises one or more buffers that may be used to dissolve any of the components, and/or to provide suitable reaction conditions for one or more of the components. Such buffers may include one or more of PBS, HEPES, Tris, MOPS, Na₂CO₃, NaHCO₃, NaB, or combinations thereof. In certain embodiments, the reaction condition includes a proper pH, such as a basic pH. In certain embodiments, the pH is between 7-10.

[0453] In certain embodiments, any one or more of the kit components may be stored in a suitable container.

### EXAMPLES

### Example 1 Identification and Characterization of Engineered Cas13e Effector Enzymes Having Reduced Collateral Effect

[0454] This example demonstrates that collateral effect or non-sequence-specific endonuclease activity of the Cas13 enzymes (e.g., Cas13e) can be largely reduced by introducing mutations that reduce the affinity between Cas13e and potential RNA targets (sequence specific or non-sequence specific targets), thus disproportionally reducing collateral non-sequence-specific endonuclease activity, while substantially maintaining sequence-specific endonuclease activity against the target RNA, partly due to the binding between the guide sequence and the target RNA. See FIG. 1.

[0455] Using the I-TASSER website (zhanglab.ccmb.med.umich.edu/I-TASSER), the 3D structure of Cas13e was predicted. Further, using the NCBI web tool (ncbi.nlm.nih.gov/Structure/icn3d/full.html), or PyMOL, the predicted structure was visualized. Based on the relevant sequence information, sequences that are spatially close to the two HEPN RXXXXH sequences were analyzed in Cas13e. See FIG. 2. These spatially close sequences were predicted to participate in binding of the target RNAs (both guide-sequence-specific and non-guide sequence-specific target RNAs) by the Cas13e effector enzyme, before the target RNA molecules were cleaved in the catalytic domain of the Cas13e endonuclease.

[0456] Based on this theory, sequences that are spatially close to the two HEPN domains in Cas13e, e.g., residues 2-187 and 634-755 that are around the two HEPN domains, respectively, as well as the spatially close region between residues 227-242, were systematically mutated (see FIG. 3) over the entire regions of interest. Within each region, mutations were focused on those residues that likely participate in RNA binding (or RNA binding hotspots), namely those with nitrogen-containing and/or positively charged side chain groups such as R, K, H, N, or Q residues. These mutation hotspot residues were systematically changed to Ala to avoid catastrophic disruption of the overall protein folding, based on the principle of Ala scanning mutagenesis.

[0457] In order to facilitate further screening and selection, to the ends of each selected mutagenesis region (see FIG. 3), a BpiI recognition sequence was introduced, i.e., GTCTTC on one end (corresponding to the di-peptide sequence of ValPhe or VF), and GAAGAC on the other end (corresponding to the di-peptide sequence of GluAsp or ED). In general, 5-8 mutations were introduced between each pair of BpiI recognition sequences. In some mutation regions, Y/S/T>A style mutants were introduced.

[0458] To facilitate further characterization, an EGFP-mCherry double fluorescent reporting system was constructed (see FIG. 4). In that system, expression of EGFP and mCherry were under the separate but identical control of their respective SV40 promoters, in order to ensure that their mRNA ratio was relatively stably maintained in transfected cells. The gRNA of this system specifically targeted EGFP coding sequence (mRNA). In addition, each tested engineered Cas13e has a NLS (nuclear localization sequence) at the N-terminus, as well as the C-terminus. The CMV promoter was used to drive the expression of the engineered Cas13e.

[0459] The sequences of the EGFP and mCherry reporters are in SEQ ID NOs: 1 and 2. The gRNA is SEQ ID NO: 3. Wild type Cas13e protein is SEQ ID NO: 4, and its codon-optimized polynucleotide coding sequence is SEQ ID NO: 5.

[0460] Human HEK293T cells were cultured in 24-well tissue culture plates according to standard methods, before the double-fluorescent reporting system plasmid was transfected into the cells using standard polyethylenimine (PEI) transfection. Transfected cells were then cultured at 37° C. under CO₂ for 48 hrs. EGFP and mCherry signals were detected using FACS.

[0461] The standard for selecting engineered Cas13e with reduced collateral effect, using the double-fluorescent reporting system, was following:

[0462] 1) mutant/engineered Cas13e has similar/equivalent EGFP signal compared to the wild-type Cas13e, indicating that the guide-sequence-specific cleavage of the target RNA (EGFP) was not/little affected by the mutations in the engineered Cas13e;

[0463] 2) mutant/engineered Cas13e has similar/equivalent mCherry signal compared to the nuclease dead dCas13e, indicating that the non-sequence-specific cleavage of the non-target RNA (mCherry) was non-existing in the engineered Cas13e, just like dCas13e that is unable to cleave mCherry mRNA.

[0464] Based on the above standard and further characterization, 5 distinct engineered Cas13e were identified, each with much reduced collateral effect compared to wild-type Cas13e (see FIGS. 5-7), including Mut-6, -7, -12, -17, and -19. The complete protein sequences of these engineered Cas13e are in SEQ ID NOs: 6-10, respectively. The coding sequences are SEQ ID NOs: 11-15, respectively.

[0465] For comparison, in the Mut-6 mutation region, the corresponding wild-type sequence and mutant sequence listed below in SEQ ID NOs: 16 and 17, with changed sequences double underlined. The corresponding nucleotide sequences are in SEQ ID NOs: 18 and 19.

(SEQ ID NO: 16)
LVNRDKNDGLFVESLLR
(SEQ ID NO: 17)
VFAAAAAAGLFVASLED
(SEQ ID NO:18)
CTGGTGAACCGGGACAAGAACGACGGCCTG
TTCGTGGAAAGCCTGCTGAGA
(SEQ ID NO: 19)
gtcttcgcCgccGcCgccgccGcC
GGCCTGTTCGTGGccAGCCTGgaagac

[0466] In the Mut-7 mutation region, the corresponding wild-type sequence and mutant sequence listed below in SEQ ID NOs: 20 and 21, with changed sequences double underlined. The corresponding nucleotide sequences are in SEQ ID NOs: 22 and 23.

(SEQ ID NO: 20)
HEKYSKHDWYDEDTRA
(SEQ ID NO: 21)
VFAYSAAAWYAAATED
(SEQ ID NO: 22)
CACGAGAAGTACAGCAAGCACGACTG
GTACGACGAAGATACCCGGGCC
(SEQ ID NO: 23)
gtcttcgccTACAGCgccgccgccTGGT
ACGccgcccgccACCgaagac

[0467] In the Mut-12 mutation region, the corresponding wild-type sequence and mutant sequence listed below in SEQ ID NOs: 22 and 23, with changed sequences double underlined. The corresponding nucleotide sequences are in SEQ ID NOs: 24 and 25.

(SEQ ID NO: 24)
RVLDRLYGAVSGLKKN
(SEQ ID NO: 25)
VFLAALAGAVAGLAED
(SEQ ID NO: 26)
AGAGTGCTGGATCGGCTGTATGGAGCCGTG
TCCGGCCTGAAGAAGAAT
(SEQ ID NO: 27
gtcttcCTGGccgccCTGgccG
GAGCCGTGgCCGGCCTGgccgaagac

[0468] In the Mut-17 mutation region, the corresponding wild-type sequence and mutant sequence listed below in SEQ ID NOs: 28 and 29, with changed sequences double underlined. The corresponding nucleotide sequences are in SEQ ID NOs: 30 and 31.

(SEQ ID NO: 28)
EKGKIRYHTVYEKGFR
(SEQ ID NO: 29)
VFGAIAAATVYAAGED
(SEQ ID NO: 30)
GAAAAGGGCAAGATCCGGTACCACACAGTGTACGAAAAGGGCTTTAGA
(SEQ ID NO: 31)
gtcttcGGCgccATCgccgccgccA
CAGTGTACgccgccGGCgaagac

[0469] In the Mut-19 mutation region, the corresponding wild-type sequence and mutant sequence listed below in SEQ ID NOs: 32 and 33, with changed sequences double underlined. The corresponding nucleotide sequences are in SEQ ID NOs: 34 and 35.

(SEQ ID NO: 32)
GAHYIDFREILAQTMC
(SEQ ID NO: 33)
VFAAIAFAAILAQAED
(SEQ ID NO: 34)
GGCGCCCACTACATCGACTTCCGGGAGATCCTGGCCCAGACCATGTGC
(SEQ ID NO: 35)
GtcttcgcCgcCATCGcCTTCgccGccATCCTGGCCCAGgCCgaagaC

[0470] Based on further characterization, Mut-17 and Mut-19 essentially eliminated collateral effect of wild-type Cas13e, while maintained relatively high guide-sequence specific endonuclease activity.

[0471] Further, the method described herein has been shown to be able to identify residues for engineering even though these residues are far away from the HEPN domains in primary sequence, but can be shown to be spatially close to the HEPN domains based on predicted 3D structure (using commonly available tools such as PyMOL or I-TASSER). See FIG. 8.

### Example 2 Identification and Characterization of Further Engineered Cas13e Effector Enzymes Point Mutations Having Reduced Collateral Effect

[0472] In order to narrow down the key amino acids in the Mut-17 region that affect the bystander effect, a series of 8 mutations in the Mut-17 region were constructed and tested, including M17.5, M17.6, M17.8, M17.9, M17.10, M17.11, M17.12, and M17.13 (see FIG. 9). M17.0-6 is the same as Mut-17.

[0473] For comparison, in the M17.5 mutation region, the corresponding wild-type sequence and mutant sequence are listed below in SEQ ID NOs: 28 and 36, with changed sequences double underlined.

(SEQ ID NO: 28)
EKGKIRYHTVYEKGFR
(SEQ ID NO: 36)
AKGKIRYHTVYAKGFR

[0474] In the M17.6 mutation region, the corresponding wild-type sequence and mutant sequence are listed below in SEQ ID NOs: 28 and 37, with changed sequences double underlined.

(SEQ ID NO: 28)
EKGKIRYHTVYEKGFR
(SEQ ID NO: 37)
EKGKIRAHTVAEKGAR

[0475] In the M17.8 mutation region, the corresponding wild-type sequence and mutant sequence are listed below in SEQ ID NOs: 28 and 38, with changed sequences double underlined.

(SEQ ID NO: 28)
EKGKIRYHTVYEKGFR
(SEQ ID NO: 38)
EKGKIRAHTVYEKGFR

[0476] In the M17.9 mutation region, the corresponding wild-type sequence and mutant sequence are listed below in SEQ ID NOs: 28 and 39, with changed sequences double underlined.

(SEQ ID NO: 28)
EKGKIRYHTVYEKGFR
(SEQ ID NO: 39)
EKGKIRYHTVAEKGFR

[0477] In the M17.10 mutation region, the corresponding wild-type sequence and mutant sequence are listed below in SEQ ID NOs: 28 and 40, with changed sequences double underlined.

| (SEQ ID NO: 28) | |
|---|---|
| | EKGKIRYHTVYEKGFR |
| (SEQ ID NO: 40) | |
| | EKGKIRYHTVYEKGAR |

[0478] In the M17.11 mutation region, the corresponding wild-type sequence and mutant sequence are listed below in SEQ ID NOs: 28 and 41, with changed sequences double underlined.

| (SEQ ID NO: 28) | |
|---|---|
| | EKGKIRYHTVYEKGFR |
| (SEQ ID NO: 41) | |
| | EKAKIRYHTVYEKAFR |

[0479] In the M17.12 mutation region, the corresponding wild-type sequence and mutant sequence are listed below in SEQ ID NOs: 28 and 42, with changed sequences double underlined.

| (SEQ ID NO: 28) | |
|---|---|
| | EKGKIRYHTVYEKGFR |
| (SEQ ID NO: 42) | |
| | EKGKARYHTVYEKGFR |

[0480] In the M17.13 mutation region, the corresponding wild-type sequence and mutant sequence are listed below in SEQ ID NOs: 28 and 43, with changed sequences double underlined.

| (SEQ ID NO: 28) | |
|---|---|
| | EKGKIRYHTVYEKGFR |
| (SEQ ID NO: 43) | |
| | EKGKIRYHAVYEKGFR |

[0481] Based on this further characterization, and consistent with previous results, most tested point mutations within the Mut-17 region do not have significant effect on the guide sequence-dependent RNase activity (see FIG. 11)—most mutants have comparable levels of guide sequence-dependent RNase activity compared to wild-type Cas13e.1.

[0482] In contrast, point mutations M17.6, M17.8 and M17.9 (SEQ ID NOs: 37-39) essentially eliminated collateral effect of wild-type Cas13e to dCas13e.1 level, while the other point mutations retained different degrees of collateral effect compared to wild-type Cas13e.1, including in some cases enhanced collateral effect (see FIG. 10). Therefore, residues Y672 and Y676 in the Mut-17 region of wtCas13e.1 appear to be two key residues that affect the collateral circumcision effect of wild-type Cas13e.1.

[0483] Similarly, in order to narrow down the key amino acid residues in the Mut-19 region that affect the collateral activity, a series of 6 mutants in the Mut-19 region were constructed and tested (see FIG. 12), including M19.1, M19.2, M19.3, M19.4, M19.5, and M19.6.

[0484] For comparison, in the M19.1 mutation region, the corresponding wild-type Cas13e.1 sequence and mutant sequences are listed below in SEQ ID NOs: 32 and 44, with changed sequences double underlined.

| (SEQ ID NO: 32) | |
|---|---|
| | GAHYIDFREILAQTMC |
| (SEQ ID NO: 44) | |
| | GAAYIDFREILAQTMC |

[0485] In the M19.2 mutation region, the corresponding wild-type Cas13e.1 sequence and mutant sequences are listed below in SEQ ID NOs: 32 and 45, with changed sequences double underlined.

| (SEQ ID NO: 32) | |
|---|---|
| | GAHYIDFREILAQTMC |
| (SEQ ID NO: 45) | |
| | GAHAIDFREILAQTMC |

[0486] In the M19.3 mutation region, the corresponding wild-type Cas13e.1 sequence and mutant sequences are listed below in SEQ ID NOs: 32 and 46, with changed sequences double underlined.

| (SEQ ID NO: 32) | |
|---|---|
| | GAHYIDFREILAQTMC |
| (SEQ ID NO: 46) | |
| | GAHYIDFAEILAQTMC |

[0487] In the M19.4 mutation region, the corresponding wild-type Cas13e.1 sequence and mutant sequences are listed below in SEQ ID NOs: 32 and 47, with changed sequences double underlined.

| (SEQ ID NO: 32) | |
|---|---|
| | GAHYIDFREILAQTMC |
| (SEQ ID NO: 47) | |
| | GAHYIAFRAILAQTMC |

[0488] In the M19.5 mutation region, the corresponding wild-type Cas13e.1 sequence and mutant sequences are listed below in SEQ ID NOs: 32 and 48, with changed sequences double underlined.

| (SEQ ID NO: 32) | |
|---|---|
| | GAHYIDFREILAQTMC |
| (SEQ ID NO: 48) | |
| | AAHYADFREALAQAMA |

[0489] In the M19.6 mutation region, the corresponding wild-type Cas13e.1 sequence and mutant sequences are listed below in SEQ ID NOs: 32 and 49, with changed sequences double underlined.

| (SEQ ID NO: 32) | |
|---|---|
| | GAHYIDFREILAQTMC |
| (SEQ ID NO: 49) | |
| | GAHYIDAREIAAATAC |

[0490] Based on this further characterization, and consistent with previous results, most tested point mutations within the Mut-19 region do not have significant effect on the guide sequence-dependent RNase activity (see FIG. 14) — most mutants have comparable levels of guide sequence-dependent RNase activity compared to wild-type Cas13e.1.

[0491] In contrast, point mutations M19.2 and M19.5 (SEQ ID NOs: 45 and 48) essentially eliminated collateral effect of wild-type Cas13e to dCas13e.1 level, while the other point mutations retained different degrees of collateral effect compared to wild-type Cas13e.1 (see FIG. 13). Therefore, residues Y715 in the Mut-19 region of wtCas13e.1 appear to be a key residue that affects the collateral circumcision effect of wild-type Cas13e.1.

### Example 3 Collateral Effects of Cas13 in Mammalian Cells

[0492] Collateral RNA degradation by the Cas13 family of effector enzymes has previously been found in glioma cells and flies, but its presence in mammalian cells has not been definitively demonstrated. Based on the fast and sensitive dual-fluorescence reporter system for detecting collateral effects as described herein, this example demonstrates that Cas13 could indeed induce substantial collateral effects in HEK293T cells when targeting either exogenous and endogenous genes. In particular, Cas13d was shown to mediate transcriptome-wide RNA off-target editing, causing cell growth arrest and reducing cell viability.

[0493] Specifically, to evaluate the collateral effects of Cas13 in mammalian cells, Cas13 (Cas13a or Cas13d) were co-transfected with EGFP and mCherry coding sequences, together with targeted (against mCherry) or non-targeted (NT, control) guide RNA (gRNA) into HEK293T cells. Expression levels of the targeted mCherry and the non-targeted EGFP were measured 48 hrs after transfection (FIG. 16A).

[0494] It was found that, with three different mCherry gRNAs, both Cas13a and Cas13d not only mediated expected decrease of mCherry fluorescence intensity, but also caused significant decrease of EGFP fluorescence intensity, as compared to NT gRNA (FIG. 16C). This result was further confirmed by EGFP and mCherry transcripts analysis with qPCR (FIG. 16B).

[0495] Together, these findings showed that collateral effects of Cas13-mediated RNA reduction were detectable in the mammalian HEK293T cells when targeting transiently overexpressed exogenous genes.

[0496] However, the collateral effects are not limited to transiently overexpressed exogenous genes. The data presented herein also demonstrates that Cas13d could induce collateral effects when targeting endogenous genes in HEK293T.

[0497] Flow cytometry experiments showed that Cas13d-mediated knockdown induced a substantial collateral cleavage (as indicated by the reduction of EGFP and mCherry fluorescence) when targeting the endogenous RPL4 gene (FIG. 16B), and a slight collateral cleavage when targeting the endogenous PKM and PFN1 genes (FIG. 16D).

[0498] Furthermore, by determining the RNA-targeting efficiency on RPL4 with four different gRNAs (gRNA-1 to gRNA-4), consistently robust knockdown for RPL4 with each gRNA by Cas13 targeting was observed, along with notable knockdown of EGFP transcript with RPL4 gRNA-1, gRNA-3 and gRNA-4, but not gRNA-2 (FIG. 16B, right panel). This observation is consistent with previous reports that different gRNAs exhibited different extent of collateral effects when targeting the same or different transcripts, probably due to the stability of Cas13/gRNA complexes.

[0499] Regardless, these findings convincingly demonstrate that Cas13-mediated RNA knockdown results in substantial collateral effects in mammalian cells, when targeting either exogenous or endogenous genes.

### Example 4 Eliminating Collateral Effects of Cas13d through Mutagenesis

[0500] Consistent with what has been shown in Examples 1 and 2 concerning Cas13e, the example demonstrates that the collateral effects of other Cas13 (e.g., Cas13d or CasRx) can also be diminished (even if not completely eliminated) via mutagenesis, based on the hypothesis that changing RNA-binding cleft proximal to catalytic sites RXXXXH in HEPN domains may selectively decrease promiscuous RNA binding and non-target cleavage while maintain on-target RNA cleavage.

[0501] Specifically, as before, a publicly available online tool TASSER was used to predict the 3D structure of Cas13d, and the predicted structure was visualized with PyMOL in order to determine the position of the various structual domains in 3D (see FIGS. 17B and 17C).

[0502] Then an unbiased screening system was designed based on the dual-fluorescence approach described above, in which coding sequences for EGFP, mCherry, EGFP-targeting gRNA, together with each Cas13 variants, were inserted into one plasmid for expression in 293T cells. In this system, expression of EGFP and expression of mCherry were driven by the same SV40 promoter, in order to ensure roughly equally stable expression of the reporter genes in the transfected host cell. The gRNA was chosen to be specific for EGFP mRNA. Each coding sequence for Cad13d and variants has an N-terminal and a C-terminal nuclear localization signal (NLS), and expression of Cas13d and variants/mutants was driven by the strong CAG promoter.

[0503] The EGFP and mCherry coding sequences are SEQ ID NOs: 1 and 2, respectively. The corresponding DNA sequence of the gRNA is SEQ ID NO: 3. The wild-type Cas13d protein sequence is SEQ ID NO: 101. The coding sequence for the wild-type Cas13d is SEQ ID NO: 102. The CAG promoter sequence is SEQ ID NO: 103. The SV40 promoter sequence is SEQ ID NO: 104.

[0504] The HEPN1-I, HEPN1-II, and HEPN2 domains of Cas13d, corresponding to residues 77-328 and 458-961, were chosen for generating a Cas13d mutagenesis library. First, these regions were divided into 21 small segments (N1-N21), each with about 36 residues. More specifically, these 21 mutated regions cover HEPN1-I (N1-N6), HEPN1-II (N8-N10), HEPN2 (N14-N21), Helical-1 (N7) and Helical-2 (N10-N14) domains (FIG. 17C).

[0505] To facilitate subsequent selection, a BpiI restriction enzyme recognition site (GTCTTC, corresponding to encoded residues VF; reverse complement GAAGAC, corresponding to encoded residues ED) was introduced at each end of the segments. When producing mutants, all non-Ala residues were substituted by Ala, and all Ala residues were substituted by Val (e.g., replacing all non-alanine to alanine, X>A, and alanine to valine, A>V). About 4-5 total mutations were introduced between the two BpiI sites flanking each segment. The various mutants so generated and their corresponding wild-type sequences (N1L1-N21L, N1R-N21R) are provided below.

| | | SEQ | | SEQ |
|---|---|---|---|---|
| | | ID | | ID |
| Variants | Amino Acids | NO: | DNA sequence | NO: |
| N1L | KGYAVVANNPLYTGPVQ | 105 | AAGGGCTACGCCGTGGTGGCTAACAACCCACTGTACACCGGACCAGTGCAG | 106 |
| N1V1 | AAYAVVAANPLYAAPVQ | 107 | gccgccTACGCCGTGGTGGCTgccAACCCACTGTACgccgccCCAGTGCAG | 108 |
| N1V2 | KGYAAAANAPLYTGPAQ | 109 | AAGGGCTACGCCgccgccGCTAACgccCCACTGTACACCGGACCAgccCAG | 110 |
| N1V3 | KGYVVVVNNPAYTGPVA | 111 | AAGGGCTACgtgGTGGTGgtgAACAACCCAgccTACACCGGACCAGTGgcc | 112 |
| N1-Y79A | KGAAVVANNPLYTGPVQ | 113 | AAGGGCgccGCCGTGGTGGCTAACAACCCACTGTACACCGGACCAGTGCAG | 114 |
| N1-Y88A | KGYAWANNPLATGPVQ | 115 | AAGGGCTACGCCGTGGTGGCTAACAACCCACTGgccACCGGACCAGTGCAG | 116 |
| NIR | QDMLGLKETLEKRYFGESA | 117 | CAGGACATGCTGGGACTGAAGGAGACACTGGAGAAGAGGTACTTCGGCGAGTCCGCC | 118 |
| N1V4 | AAMLGLAETLEARYFGEAA | 119 | gccgccATGCTGGGACTGgccGAGACACTGGAGgccAGGTACTTCGGCGAGgccGCC | 120 |
| N1V5 | QDMAAAKEALEKRYFAESA | 121 | CAGGACATGgccgccgccAAGGAGgccCTGGAGAAGAGGTACTTCgccGAGTCCGCC | 122 |
| N1V6 | QDALGLKATAEKRYAGESA | 123 | CAGGACgccCTGGGACTGAAGgccACAgccGAGAAGAGGTACgccGGCGAGTCCGCC | 124 |
| N1V7 | QDMLGLKETLAKAYFGASV | 125 | CAGGACATGCTGGGACTGAAGGAGACACTGgccAAGgccTACTTCGGCgccTCCgtg | 126 |
| N1-Y107A | QDMLGLKETLEKRAFGESA | 127 | CAGGACATGCTGGGACTGAAGGAGACACTGGAGAAGAGGgccTTCGGCGAGTCCGCC | 128 |
| N2L | DGNDNICIQVIHNILDI | 129 | GACGGAAACGATAACATCTGCATCCAGGTCATCCACAACATCCTGGATATC | 130 |
| N2V1 | AAAANICIQVIHNILAI | 131 | gccgccgccgccAACATCTGCATCCAGGTCATCCACAACATCCTGgccATC | 132 |
| N2V2 | DGNDAICIAAIHAILDI | 133 | GACGGAAACGATgccATCTGCATCgccgccATCCACgccATCCTGGATATC | 134 |
| N2V3 | DGNDNAAIQVIANIADI | 135 | GACGGAAACGATAACgccgccATCCAGGTCATCgccAACATCgccGATATC | 136 |
| N2V4 | DGNDNICAQVAHNALDA | 137 | GACGGAAACGATAACATCTGCgccCAGGTCgccCACAACgccCTGGATgcc | 138 |
| N2R | EKILAEYITNAAYAVNNIS | 139 | GAGAAGATCCTGGCTGAGTACATCACAAACGCCGCTTACGCCGTGAACAACATCTCC | 140 |
| N2V5 | AAILAEYIAAAAYAVNNIA | 141 | gccgccATCCTGGCTGAGTACATCgccgccGCCGCTTACGCCGTGAACAACATCgcc | 142 |
| N2V6 | EKIAAEYITNAAYAAAAIS | 143 | GAGAAGATCgccGCTGAGTACATCACAAACGCCGCTTACGCCgccgccgccATCTCC | 144 |
| N2V7 | EKALAAYATNAAYAVNNAS | 145 | GAGAAGgccCTGGCTgccTACgccACAAACGCCGCTTACGCCGTGAACAACgccTCC | 146 |
| N2V8 | EKILVEYITNVVYVVNNIS | 147 | GAGAAGATCCTGgtgGAGTACATCACAAACgtggtgTACgtgGTGAACAACATCTCC | 148 |
| N2-Y136A | EKILAEAITNAAYAVNNIS | 149 | GAGAAGATCCTGGCTGAGgccATCACAAACGCCGCTTACGCCGTGAACAACATCTCC | 150 |
| N2-Y142A | EKILAEYITNAAAAVNNIS | 151 | GAGAAGATCCTGGCTGAGTACATCACAAACGCCGCTgccGCCGTGAACAACATCTCC | 152 |
| N3L | GLDKDIIGFGKFSTVYT | 153 | GGCCTGGACAAGGATATCATCGGCTTCGGAAAGTTTTCTACCGTGTACACA | 154 |
| N3V1 | ALDADIIGFGAFATVYT | 155 | gccCTGGACgccGATATCATCGGCTTCGGAgccTTTgccACCGTGTACACA | 156 |
| N3V2 | GLDKDIIAFAKFSAVYA | 157 | GGCCTGGACAAGGATATCATCgccTTCgccAAGTTTTCTgccGTGTACgcc | 158 |
| N3V3 | GAAKAIIGFGKFSTAYT | 159 | GGCgccgccAAGgccATCATCGGCTTCGGAAAGTTTTCTACCgccTACACA | 160 |
| N3V4 | GLDKDAAGAGKASTVYT | 161 | GGCCTGGACAAGGATgccgccGGCgccGGAAAGgccTCTACCGTGTACACA | 162 |
| N3-Y164A | GLDKD11GFGKFSTVAT | 163 | GGCCTGGACAAGGATATCATCGGCTTCGGAAAGTTTTCTACCGTGgccACA | 164 |
| N3R | YDEFKDPEHHRAAFNNNDK | 165 | TACGACGAGTTCAAGGATCCAGAGCACCACCGGGCCGCTTTTAACAACAACGACAAG | 166 |
| N3V5 | AAEFAAPEHHRAAFNNNDA | 167 | gccgccGAGTTCgccgccCCAGAGCACCACCGGGCCGCTTTTAACAACAACGACgcc | 168 |
| N3V6 | YDEFKDPEAHRAAFAAAAK | 169 | TACGACGAGTTCAAGGATCCAGAGgccCACCGGGCCGCTTTTgccgccgccgccAAG | 170 |
| N3V7 | YDAAKDPEHARAAANNNDK | 171 | TACGACgccgccAAGGATCCAGAGCACgccCGGGCCGCTgccAACAACAACGACAAG | 172 |
| N3V8 | YDEFKDPAHHAVVFNNNDK | 173 | TACGACGAGTTCAAGGATCCAgccCACCACgccgtggtgTTTAACAACAACGACAAG | 174 |
| N3-Y166A | ADEFKDPEHHRAAFNNNDK | 175 | gccGACGAGTTCAAGGATCCAGAGCACCACCGGGCCGCTTTTAACAACAACGACAAG | 176 |
| N4L | LINAIKAQYDEFDNFLD | 177 | CTGATCAACGCCATCAAGGCTCAGTACGACGAGTTCGATAACTTTCTGGAT | 178 |
| N4V1 | LINAIAAQYAEFANFLA | 179 | CTGATCAACGCCATCgccGCTCAGTACgccGAGTTCgccAACTTTCTGgcc | 180 |
| N4V2 | AIAAIKAAYDEFDAFLD | 181 | gccATCgccGCCATCAAGGCTgccTACGACGAGTTCGATgccTTTCTGGAT | 182 |
| N4V3 | LANAAKAQYDEADNFAD | 183 | CTGgccAACGCCgccAAGGCTCAGTACGACGAGgccGATAACTTTgccGAT | 184 |
| N4V4 | LINVIKVQYDAFDNALD | 185 | CTGATCAACgtgATCAAGgtgCAGTACGACgccTTCGATAACgccCTGGAT | 186 |
| N4-Y193A | LINAIKAQADEFDNFLD | 187 | CTGATCAACGCCATCAAGGCTCAGgccGACGAGTTCGATAACTTTCTGGAT | 188 |
| N4R | NPRLGYFGQAFFSKEGRNY | 189 | AACCCCAGGCTGGGCTACTTCGGACAGGCTTTCTTTTCTAAGGAGGGCAGAAACTAC | 190 |
| N4V5 | AARLAYFGQAFFAAEGRNY | 191 | gccgccAGGCTGgccTACTTCGGACAGGCTTTCTTTgccgccGAGGGCAGAAACTAC | 192 |
| N4V6 | NPRLGYFAAAFFSKEARAY | 193 | AACCCCAGGCTGGGCTACTTCgccgccGCTTTCTTTTCTAAGGAGgccAGAgccTAC | 194 |
| N4V7 | NPRAGYAGQAAASKEGRNY | 195 | AACCCCAGGgccGGCTACgccGGACAGGCTgccgccTCTAAGGAGGGCAGAAACTAC | 196 |
| N4V8 | NPALGYFGQVFFSKAGANY | 197 | AACCCCgccCTGGGCTACTTCGGACAGgtgTTCTTTTCTAAGgccGGCgccAACTAC | 198 |
| N4-Y207A | NPRLGAFGQAFFSKEGRNY | 199 | AACCCCAGGCTGGGCgccTTCGGACAGGCTTTCTTTTCTAAGGAGGGCAGAAACTAC | 200 |
| N4-Y220A | NPRLGYFGQAFFSKEGRNA | 201 | AACCCCAGGCTGGGCTACTTCGGACAGGCTTTCTTTTCTAAGGAGGGCAGAAACgcc | 202 |
| N5L | IINYGNECYDILALLSG | 203 | ATCATCAACTACGGAAACGAGTGTTACGACATCCTGGCCCTGCTGAGCGGA | 204 |
| N5V1 | IIAYANECYAILALLAA | 205 | ATCATCgccTACgccAACGAGTGTTACgccATCCTGGCCCTGCTGgccgcc | 206 |
| N5V2 | IINYGAEAYDIAAAASG | 207 | ATCATCAACTACGGAgccGAGgccTACGACATCgccGCCgccgccAGCGGA | 208 |
| N5V3 | AANYGNACYDALVLLSG | 209 | gccgccAACTACGGAAACgccTGTTACGACgccCTGgtgCTGCTGAGCGGA | 210 |
| N5R | LRHWVVHNNEEESRISRTW | 211 | CTGAGGCACTGGGTGGTGCACAACAACGAGGAGGAGTCTCGGATCAGCCGCACCTGG | 212 |
| N5V4 | AAHWVVHNNEEEARIARAW | 213 | gccgccCACTGGGTGGTGCACAACAACGAGGAGGAGgccCGGATCgccCGCgccTGG | 214 |
| N5V5 | LRHWVVHAAAAESRASRTW | 215 | CTGAGGCACTGGGTGGTGCACgccgccgccgccGAGTCTCGGgccAGCCGCACCTGG | 216 |
| N5V6 | LRHWVVHNNEEASAISATA | 217 | CTGAGGCACTGGGTGGTGCACAACAACGAGGAGgccTCTgccATCAGCgccACCgcc | 218 |
| N6L | LYNLDKNLDNEYISTLN | 219 | CTGTACAACCTGGACAAGAACCTGGATAACGAGTACATCTCCACACTGAAC | 220 |
| N6V1 | LYNLAANLANEYIAALN | 221 | CTGTACAACCTGgccgccAACCTGgccAACGAGTACATCgccgccCTGAAC | 222 |
| N6V2 | AYALDKALDAEYISTLA | 223 | gccTACgccCTGGACAAGgccCTGGATgccGAGTACATCTCCACACTGgcc | 224 |
| N6V3 | LYNADKNADNAYASTAN | 225 | CTGTACAACgCCGACAAGAACgCCGATAACgCCTACgCCTCCACAgcCAAC | 226 |
| N6-Y258A | LANLDKNLDNEYISTLN | 227 | CTGgccAACCTGGACAAGAACCTGGATAACGAGTACATCTCCACACTGAAC | 228 |
| N6-Y268A | LYNLDKNLDNEAISTLN | 229 | CTGTACAACCTGGACAAGAACCTGGATAACGAGgccATCTCCACACTGAAC | 230 |
| N6R | YLYDRITNELTNSFSKNSA | 231 | TACCTGTACGACAGGATCACCAACGAGCTGACAAACAGCTTCTCCAAGAACTCTGCC | 232 |
| N6V4 | AAYDRITNELTNAFAANSA | 233 | gccgccTACGACAGGATCACCAACGAGCTGACAAACgccTTCgccgccAACTCTGCC | 234 |
| N6V5 | YLYARIAAELANSFSKNAA | 235 | TACCTGTACgccAGGATCgccgccGAGCTGgccAACAGCTTCTCCAAGAACgccGCC | 236 |
| N6V6 | YLYDRATNEATASFSKASA | 237 | TACCTGTACGACAGGgccACCAACGAGgccACAgccAGCTTCTCCAAGgccTCTGCC | 238 |
| N6V7 | YLYDAITNALTNSASKNSV | 239 | TACCTGTACGACgccATCACCAACgccCTGACAAACAGCgccTCCAAGAACTCTgtg | 240 |
| N6-Y274A | ALYDRITNELTNSFSKNSA | 241 | gccCTGTACGACAGGATCACCAACGAGCTGACAAACAGCTTCTCCAAGAACTCTGCC | 242 |
| N6-Y276A | YLADRITNELTNSFSKNSA | 243 | TACCTGgccGACAGGATCACCAACGAGCTGACAAACAGCTTCTCCAAGAACTCTGCC | 244 |
| N7L | ANVNYIAETLGINPAEF | 245 | GCTAACGTGAACTACATCGCTGAGACCCTGGGCATCAACCCAGCTGAGTTC | 246 |
| N7V1 | AAVAYIAEALAIAPAEF | 247 | GCTgccGTGgccTACATCGCTGAGgccCTGgccATCgccCCAGCTGAGTTC | 248 |
| N7V2 | ANANYAAETAGANPAEA | 249 | GCTAACgccAACTACgccGCTGAGACCgccGGCgccAACCCAGCTGAGgcc | 250 |
| N7V3 | VNVNYIVATLGINPVAF | 251 | gtgAACGTGAACTACATCgtggccACCCTGGGCATCAACCCAgtggccTTC | 252 |
| N7-Y297A | ANVNAIAETLGINPAEF | 253 | GCTAACGTGAACgccATCGCTGAGACCCTGGGCATCAACCCAGCTGAGTTC | 254 |
| N7R | AEQYFRFSIMKEQKNLGFN | 255 | GCTGAGCAGTACTTCAGATTTTCCATCATGAAGGAGCAGAAGAACCTGGGCTTCAAC | 256 |
| N7V4 | VAQYFRFAIMAEQANLGFN | 257 | gtggccCAGTACTTCAGATTTgccATCATGgccGAGCAGgccAACCTGGGCTTCAAC | 258 |
| N7V5 | AEAYFRFSIMKEAKALAFA | 259 | GCTGAGgccTACTTCAGATTTTCCATCATGAAGGAGgccAAGgccCTGgccTTCgcc | 260 |
| N7V6 | AEQYARFSAAKEQKNAGFN | 261 | GCTGAGCAGTACgccAGATTTTCCgccgccAAGGAGCAGAAGAACgccGGCTTCAAC | 262 |
| N7V7 | AEQYFAASIMKAQKNLGAN | 263 | GCTGAGCAGTACTTCgccgccTCCATCATGAAGgccCAGAAGAACCTGGGCgccAAC | 264 |
| N7-Y313A | AEQAFRFSIMKEQKNLGFN | 265 | GCTGAGCAGgccTTCAGATTTTCCATCATGAAGGAGCAGAAGAACCTGGGCTTCAAC | 266 |
| N8L | AGRDVSAFSKLMYALTM | 267 | GCTGGAAGGGACGTGAGCGCCTTCAGCAAGCTGATGTACGCCCTGACAATG | 268 |
| N8V1 | AARDVAAFAALMYALTM | 269 | GCTgccAGGGACGTGgccGCCTTCgccgccCTGATGTACGCCCTGACAATG | 270 |
| N8V2 | AGRAASAFSKAMYALAM | 271 | GCTGGAAGGgccgccAGCGCCTTCAGCAAGgccATGTACGCCCTGgccATG | 272 |
| N8V3 | AGRDVSAASKLAYAATA | 273 | GCTGGAAGGGACGTGAGCGCCgccAGCAAGCTGgccTACGCCgccACAgcc | 274 |
| N8V4 | VGADVSVFSKLMYVLTM | 275 | gtgGGAgccGACGTGAGCgtgTTCAGCAAGCTGATGTACgtgCTGACAATG | 276 |
| N8-Y470A | AGRDVSAFSKLMAALTM | 277 | GCTGGAAGGGACGTGAGCGCCTTCAGCAAGCTGATGgccGCCCTGACAATG | 278 |
| N8R | FLDGKEINDLLTTLINKFD | 279 | TTTCTGGACGGAAAGGAGATCAACGATCTGCTGACCACACTGATCAACAAGTTCGAC | 280 |
| N8V5 | AADAAEINDLLTTLINAFD | 281 | gccgccGACgccgccGAGATCAACGATCTGCTGACCACACTGATCAACgccTTCGAC | 282 |
| N8V6 | FLAGKEINALLAALINKFA | 283 | TTTCTGgccGGAAAGGAGATCAACgccCTGCTGgccgccCTGATCAACAAGTTCgcc | 284 |
| N8V7 | FLDGKEIADAATTAIAKFD | 285 | TTTCTGGACGGAAAGGAGATCgccGATgccgccACCACAgccATCgccAAGTTCGAC | 286 |
| N8V8 | FLDGKAANDLLTTLANKAD | 287 | TTTCTGGACGGAAAGgccgccAACGATCTGCTGACCACACTGgccAACAAGgccGAC | 288 |
| N9L | NIQSFLKVMPLIGVNAK | 289 | AACATCCAGTCTTTTCTGAAAGTGATGCCTCTGATCGGCGTGAACGCTAAG | 290 |
| N9V1 | NIQAFLAVMPLIAVNAA | 291 | AACATCCAGgccTTTCTGgccGTGATGCCTCTGATCgccGTGAACGCTgcc | 292 |
| N9V2 | AIQSFLKAMPLIGAAAK | 293 | gccATCCAGTCTTTTCTGAAAgccATGCCTCTGATCGGCgccgccGCTAAG | 294 |
| N9V3 | NIASFAKVAPAIGVNAK | 295 | AACATCgccTCTTTTgccAAAGTGgccCCTgccATCGGCGTGAACGCTAAG | 296 |
| N9V4 | NAQSALKVMPLAGVNVK | 297 | AACgccCAGTCTgccCTGAAAGTGATGCCTCTGgccGGCGTGAACgtgAAG | 298 |
| N9R | FVEEYAFFKDSAKIADELR | 299 | TTCGTGGAGGAGTACGCCTTCTTTAAGGACAGCGCCAAGATCGCTGATGAGCTGCGG | 300 |
| N9V5 | AAEEYAFFADAAAIADELR | 301 | gccgccGAGGAGTACGCCTTCTTTgccGACgccGCCgccATCGCTGATGAGCTGCGG | 302 |
| N9V6 | FVEEYAAFKASAKAAAEAR | 303 | TTCGTGGAGGAGTACGCCgccTTTAAGgccAGCGCCAAGgccGCTgccGAGgccCGG | 304 |
| N9V7 | FVAAYAFAKDSAKIADALR | 305 | TTCGTGgccgccTACGCCTTCgccAAGGACAGCGCCAAGATCGCTGATgccCTGCGG | 306 |
| N9V8 | FVEEYVFFKDSVKIVDELA | 307 | TTCGTGGAGGAGTACgtgTTCTTTAAGGACAGCgtgAAGATCgtgGATGAGCTGgcc | 308 |
| N9-Y515A | FVEEAAFFKDSAKIADELR | 309 | TTCGTGGAGGAGgccGCCTTCTTTAAGGACAGCGCCAAGATCGCTGATGAGCTGCGG | 310 |
| N10L | LIKSFARMGEPIADARR | 311 | CTGATCAAGTCCTTTGCCAGGATGGGAGAGCCAATCGCTGACGCTAGGAGA | 312 |
| N10V1 | LIAAFARMAEPIAAARR | 313 | CTGATCgccgccTTTGCCAGGATGgccGAGCCAATCGCTgccGCTAGGAGA | 314 |
| N10V2 | AAKSFARAGEPAADARR | 315 | gccgccAAGTCCTTTGCCAGGgccGGAGAGCCAgccGCTGACGCTAGGAGA | 316 |
| N10V3 | LIKSAVRMGAPIVDARR | 317 | CTGATCAAGTCCgccgtgAGGATGGGAgccCCAATCgtgGACGCTAGGAGA | 318 |
| N10V4 | LIKSFAAMGEPIADVAA | 319 | CTGATCAAGTCCTTTGCCgccATGGGAGAGCCAATCGCTGACgtggccgcc | 320 |
| N10R | AMYIDAIRILGTNLSYDEL | 321 | GCTATGTACATCGATGCCATCCGGATCCTGGGAACCAACCTGTCTTACGACGAGCTG | 322 |
| N10V5 | VAYIDAIRILAANLAYDEL | 323 | gtggccTACATCGATGCCATCCGGATCCTGgccgccAACCTGgccTACGACGAGCTG | 324 |
| N10V6 | AMYIAAIRIAGTALSYAEL | 325 | GCTATGTACATCgccGCCATCCGGATCgccGGAACCgccCTGTCTTACgccGAGCTG | 326 |
| N10V7 | AMYADAARILGTNASYDEA | 327 | GCTATGTACgccGATGCCgccCGGATCCTGGGAACCAACgccTCTTACGACGAGgcc | 328 |
| N10V8 | AMYIDVIAALGTNLSYDAL | 329 | GCTATGTACATCGATgtgATCgccgccCTGGGAACCAACCTGTCTTACGACgccCTG | 330 |
| N10-Y549A | AMAIDAIRILGTNLSYDEL | 331 | GCTATGgccATCGATGCCATCCGGATCCTGGGAACCAACCTGTCTTACGACGAGCTG | 332 |
| N10-Y562A | AMYIDAIRILGTNLSADEL | 333 | GCTATGTACATCGATGCCATCCGGATCCTGGGAACCAACCTGTCTgccGACGAGCTG | 334 |
| NHL | KALADTFSLDENGNKLK | 335 | AAGGCTCTGGCCGACACCTTCAGCCTGGATGAGAACGGCAACAAGCTGAAG | 336 |
| N11V1 | AALADTFALDENANALA | 337 | gccGCTCTGGCCGACACCTTCgccCTGGATGAGAACgccAACgccCTGgcc | 338 |
| NHV2 | KALAAAFSLAEAGNKLK | 339 | AAGGCTCTGGCCgccgccTTCAGCCTGgccGAGgccGGCAACAAGCTGAAG | 340 |
| NHV3 | KAAADTFSADENGAKAK | 341 | AAGGCTgccGCCGACACCTTCAGCgccGATGAGAACGGCgccAAGgccAAG | 342 |
| NHV4 | KVLVDTASLDANGNKLK | 343 | AAGgtgCTGgtgGACACCgccAGCCTGGATgccAACGGCAACAAGCTGAAG | 344 |
| NHR | KGKHGMRNFIINNVISNKR | 345 | AAGGGCAAGCACGGAATGCGCAACTTCATCATCAACAACGTGATCAGCAACAAGCGG | 346 |
| NHV5 | AAAHGMRNFIINNVIANAR | 347 | gccgccgccCACGGAATGCGCAACTTCATCATCAACAACGTGATCgccAACgccCGG | 348 |
| N11V6 | KGKHAMRAFIIAAVISAKR | 349 | AAGGGCAAGCACgccATGCGCgccTTCATCATCgccgccGTGATCAGCgccAAGCGG | 350 |
| N11V7 | KGKAGARNFAANNAISNKR | 351 | AAGGGCAAGgccGGAgccCGCAACTTCgccgccAACAACgccATCAGCAACAAGCGG | 352 |
| N11V8 | KGKHGMANAIINNVASNKA | 353 | AAGGGCAAGCACGGAATGgccAACgccATCATCAACAACGTGgccAGCAACAAGgcc | 354 |
| N12L | FHYLIRYGDPAHLHEIA | 355 | TTTCACTACCTGATCAGATACGGCGACCCAGCTCACCTGCACGAGATCGCT | 356 |
| N12V1 | FAYAIRYAAPAHAHEIA | 357 | TTTgccTACgccATCAGATACgccgccCCAGCTCACgccCACGAGATCGCT | 358 |
| N12V2 | AHYLARYGDPAALAEAA | 359 | gccCACTACCTGgccAGATACGGCGACCCAGCTgccCTGgccGAGgccGCT | 360 |
| N12V3 | FHYLIAYGDPVHLHAIV | 361 | TTTCACTACCTGATCgccTACGGCGACCCAgtgCACCTGCACgccATCgtg | 362 |
| N12-Y604A | FHALIRYGDPAHLHEIA | 363 | TTTCACgccCTGATCAGATACGGCGACCCAGCTCACCTGCACGAGATCGCT | 364 |
| N12-Y608A | FHYLIRAGDPAHLHEIA | 365 | TTTCACTACCTGATCAGAgccGGCGACCCAGCTCACCTGCACGAGATCGCT | 366 |
| N12R | KNEAVVKFVLGRIADIQKK | 367 | AAGAACGAGGCCGTGGTGAAGTTCGTGCTGGGACGGATCGCCGATATCCAGAAGAAG | 368 |
| N12V4 | AAEAVVAFVLGRIADIQAA | 369 | gccgccGAGGCCGTGGTGgccTTCGTGCTGGGACGGATCGCCGATATCCAGgccgcc | 370 |
| N12V5 | KNEAAAKFALARIAAIQKK | 371 | AAGAACGAGGCCgccgccAAGTTCgccCTGgccCGGATCGCCgccATCCAGAAGAAG | 372 |
| N12V6 | KNEAVVKAVAGRAADAAKK | 373 | AAGAACGAGGCCGTGGTGAAGgccGTGgccGGACGGgccGCCGATgccgccAAGAAG | 374 |
| N12V7 | KNAVVVKFVLGAIVDIQKK | 375 | AAGAACgccgtgGTGGTGAAGTTCGTGCTGGGAgccATCgtgGATATCCAGAAGAAG | 376 |
| N13L | QGQNGKNQIDRYYETCI | 377 | CAGGGCCAGAACGGAAAGAACCAGATCGACCGCTACTACGAGACCTGCATC | 378 |
| N13V1 | QAQNAANQIARYYEACI | 379 | CAGgccCAGAACgccgccAACCAGATCgccCGCTACTACGAGgccTGCATC | 380 |
| N13V2 | AGAAGKAAIDRYYETCI | 381 | gccGGCgccgccGGAAAGgccgccATCGACCGCTACTACGAGACCTGCATC | 382 |
| N13V3 | QGQNGKNQADAYYATAA | 383 | CAGGGCCAGAACGGAAAGAACCAGgccGACgccTACTACgccACCgccgcc | 384 |
| N13-Y649A | QGQNGKNQIDRAYETCI | 385 | CAGGGCCAGAACGGAAAGAACCAGATCGACCGCgccTACGAGACCTGCATC | 386 |
| N13-Y650A | QGQNGKNQIDRYAETCI | 387 | CAGGGCCAGAACGGAAAGAACCAGATCGACCGCTACgccGAGACCTGCATC | 388 |
| N13R | GKDKGKSVSEKVDALTKII | 389 | GGCAAGGATAAGGGAAAGTCCGTGTCTGAGAAGGTGGACGCTCTGACCAAGATCATC | 390 |
| N13V4 | AADAGASVSEAVDALTKII | 391 | gccgccGATgccGGAgccTCCGTGTCTGAGgccGTGGACGCTCTGACCAAGATCATC | 392 |
| N13V5 | GKDKAKAVAEKVDALAAII | 393 | GGCAAGGATAAGgccAAGgccGTGgccGAGAAGGTGGACGCTCTGgccgccATCATC | 394 |
| N13V6 | GKAKGKSASEKAAAATKII | 395 | GGCAAGgccAAGGGAAAGTCCgccTCTGAGAAGgccgccGCTgccACCAAGATCATC | 396 |
| N13V7 | GKDKGKSVSAKVDVLTKAA | 397 | GGCAAGGATAAGGGAAAGTCCGTGTCTgccAAGGTGGACgtgCTGACCAAGgccgcc | 398 |
| N14L | TGMNYDQFDKKRSVIED | 399 | ACAGGCATGAACTACGACCAGTTCGATAAGAAGAGATCTGTGATCGAGGAC | 400 |
| N14V1 | TAMNYDQFDAARAVIED | 401 | ACAgccATGAACTACGACCAGTTCGATgccgccAGAgccGTGATCGAGGAC | 402 |
| N14V2 | AGMNYAQFAKKRSVIEA | 403 | gccGGCATGAACTACgccCAGTTCgccAAGAAGAGATCTGTGATCGAGgcc | 404 |
| N14V3 | TGAAYDAFDKKRSAIED | 405 | ACAGGCgccgccTACGACgccTTCGATAAGAAGAGATCTgccATCGAGGAC | 406 |
| N14V4 | TGMNYDQADKKASVAAD | 407 | ACAGGCATGAACTACGACCAGgccGATAAGAAGgccTCTGTGgccgccGAC | 408 |
| N14-Y678A | TGMNADQFDKKRSVIED | 409 | ACAGGCATGAACgccGACCAGTTCGATAAGAAGAGATCTGTGATCGAGGAC | 410 |
| N14R | TGRENAEREKFKKIISLYL | 411 | ACCGGAAGGGAGAACGCCGAGAGAGAGAAGTTTAAGAAGATCATCAGCCTGTACCTG | 412 |
| N14V5 | AARENAEREAFAAIISLYL | 413 | gccgccAGGGAGAACGCCGAGAGAGAGgccTTTgccgccATCATCAGCCTGTACCTG | 414 |
| N14V6 | TGREAAEREKFKKAIAAYA | 415 | ACCGGAAGGGAGgccGCCGAGAGAGAGAAGTTTAAGAAGgccATCgccgccTACgcc | 416 |
| N14V7 | TGRANAAREKAKKIASLYL | 417 | ACCGGAAGGgccAACGCCgccAGAGAGAAGgccAAGAAGATCgccAGCCTGTACCTG | 418 |
| N14V8 | TGAENVEAAKFKKIISLYL | 419 | ACCGGAgccGAGAACgtgGAGgccgccAAGTTTAAGAAGATCATCAGCCTGTACCTG | 420 |
| N14-Y708A | TGRENAEREKFKKIISLAL | 421 | ACCGGAAGGGAGAACGCCGAGAGAGAGAAGTTTAAGAAGATCATCAGCCTGgccCTG | 422 |
| N15L | TVIYHILKNIVNINARY | 423 | ACAGTGATCTACCACATCCTGAAGAACATCGTGAACATCAACGCTAGATAC | 424 |
| N15V1 | AVIYHILAAIVAIAARY | 425 | gccGTGATCTACCACATCCTGgccgccATCGTGgccATCgccGCTAGATAC | 426 |
| N15V2 | TAAYAIAKNIANINARY | 427 | ACAgcCgCCTACgCCATCgCCAAGAACATCgCCAACATCAACGCTAGATAC | 428 |
| N15V3 | TVIYHALKNAVNANVAY | 429 | ACAGTGATCTACCACgccCTGAAGAACgccGTGAACgccAACgtggccTAC | 430 |
| N15R | VIGFHCVERDAQLYKEKGY | 431 | GTGATCGGCTTCCACTGCGTGGAGCGCGATGCCCAGCTGTACAAGGAGAAGGGATAC | 432 |
| N15V4 | AAAFHCVERDAQLYAEAGY | 433 | gccgccgccTTCCACTGCGTGGAGCGCGATGCCCAGCTGTACgccGAGgccGGATAC | 434 |
| N15V5 | VIGFHCAERAAALYKEKAY | 435 | GTGATCGGCTTCCACTGCgccGAGCGCgccGCCgccCTGTACAAGGAGAAGgccTAC | 436 |
| N15V6 | VIGAAAVERDAQAYKEKGY | 437 | GTGATCGGCgccgccgccGTGGAGCGCGATGCCCAGgccTACAAGGAGAAGGGATAC | 438 |
| N15V7 | VIGFHCVAADVQLYKAKGY | 439 | GTGATCGGCTTCCACTGCGTGgccgccGATgtgCAGCTGTACAAGgccAAGGGATAC | 440 |
| N16L | DINLKKLEEKGFSSVTK | 441 | GACATCAACCTGAAGAAGCTGGAGGAGAAGGGCTTTAGCTCCGTGACCAAG | 442 |
| N16V1 | DINLAALEEAGFASVTA | 443 | GACATCAACCTGgccgccCTGGAGGAGgccGGCTTTgccTCCGTGACCgcc | 444 |
| N16V2 | AINLKKLEEKAFSAVAK | 445 | gccATCAACCTGAAGAAGCTGGAGGAGAAGgccTTTAGCgccGTGgccAAG | 446 |
| N16V3 | DIAAKKAEEKGFSSATK | 447 | GACATCgccgccAAGAAGgccGAGGAGAAGGGCTTTAGCTCCgccACCAAG | 448 |
| N16V4 | DANLKKLAAKGASSVTK | 449 | GACgccAACCTGAAGAAGCTGgccgccAAGGGCgccAGCTCCGTGACCAAG | 450 |
| N16R | LCAGIDETAPDKRKDVEKE | 451 | CTGTGCGCTGGAATCGACGAGACAGCCCCCGACAAGAGGAAGGATGTGGAGAAGGAG | 452 |
| N16V5 | AAAGIDETAPDARADVEAE | 453 | gccgccGCTGGAATCGACGAGACAGCCCCCGACgccAGGgccGATGTGGAGgccGAG | 454 |
| N16V6 | LCAAIAEAAPAKRKAVEKE | 455 | CTGTGCGCTgccATCgccGAGgccGCCCCCgccAAGAGGAAGgccGTGGAGAAGGAG | 456 |
| N16V7 | LCAGADATAPDKRKDAAKE | 457 | CTGTGCGCTGGAgccGACgccACAGCCCCCGACAAGAGGAAGGATgccgccAAGGAG | 458 |
| N16V8 | LCVGIDETVPDKAKDVEKA | 459 | CTGTGCgtgGGAATCGACGAGACAgtgCCCGACAAGgccAAGGATGTGGAGAAGgcc | 460 |
| N17L | MAERAKESIDSLESANP | 461 | ATGGCCGAGAGAGCTAAGGAGAGCATCGACTCCCTGGAGTCTGCTAACCCT | 462 |
| N17V1 | MAERAAEAIDALEAANP | 463 | ATGGCCGAGAGAGCTgccGAGgccATCGACgccCTGGAGgccGCTAACCCT | 464 |
| N17V2 | AAERAKESIASAESAAP | 465 | gccGCCGAGAGAGCTAAGGAGAGCATCgccTCCgccGAGTCTGCTgccCCT | 466 |
| N17V3 | MAARAKASADSLASANP | 467 | ATGGCCgccAGAGCTAAGgccAGCgccGACTCCCTGgccTCTGCTAACCCT | 468 |
| N17V4 | MVEAVKESIDSLESVNP | 469 | ATGgtgGAGgccgtgAAGGAGAGCATCGACTCCCTGGAGTCTgtgAACCCT | 470 |
| N17R | KLYANYIKYSDEKKAEEFT | 471 | AAGCTGTACGCCAACTACATCAAGTACTCCGATGAGAAGAAGGCCGAGGAGTTCACC | 472 |
| N17V5 | AAYANYIAYSDEAKAEEFT | 473 | gccgccTACGCCAACTACATCgccTACTCCGATGAGgccAAGGCCGAGGAGTTCACC | 474 |
| N17V6 | KLYANYIKYAAEKAAEEFA | 475 | AAGCTGTACGCCAACTACATCAAGTACgccgccGAGAAGgccGCCGAGGAGTTCgcc | 476 |
| N17V7 | KLYAAYAKYSDAKKAEEAT | 477 | AAGCTGTACGCCgccTACgccAAGTACTCCGATgccAAGAAGGCCGAGGAGgccACC | 478 |
| N17V8 | KLYVNYIKYSDEKKVAAFT | 479 | AAGCTGTACgtgAACTACATCAAGTACTCCGATGAGAAGAAGgtggccgccTTCACC | 480 |
| N18L | RQINREKAKTALNAYLR | 481 | AGGCAGATCAACAGAGAGAAGGCCAAGACCGCTCTGAACGCCTACCTGAGG | 482 |
| N18V1 | RQIAREAAAAALNAYLR | 483 | AGGCAGATCgccAGAGAGgccGCCgccgccGCTCTGAACGCCTACCTGAGG | 484 |
| N18V2 | RAINREKAKTAAAAYAR | 485 | AGGgccATCAACAGAGAGAAGGCCAAGACCGCTgccgccGCCTACgccAGG | 486 |
| N18V3 | RQANRAKVKTVLNAYLR | 487 | AGGCAGgccAACAGAgccAAGgtgAAGACCgtgCTGAACGCCTACCTGAGG | 488 |
| N18V4 | AQINAEKAKTALNVYLA | 489 | gccCAGATCAACgccGAGAAGGCCAAGACCGCTCTGAACgtgTACCTGgcc | 490 |
| N18R | NTKWNVIIREDLLRIDNKT | 491 | AACACAAAGTGGAACGTGATCATCCGGGAGGACCTGCTGCGCATCGATAACAAGACC | 492 |
| N18V5 | AAAWNVIIREDLLRIDNAA | 493 | gccgccgccTGGAACGTGATCATCCGGGAGGACCTGCTGCGCATCGATAACgccgcc | 494 |
| N18V6 | NTKWAAIIREALLRIAAKT | 495 | AACACAAAGTGGgccgccATCATCCGGGAGgccCTGCTGCGCATCgccgccAAGACC | 496 |
| N18V7 | NTKWNVAAREDAARADNKT | 497 | AACACAAAGTGGAACGTGgccgccCGGGAGGACgccgccCGCgccGATAACAAGACC | 498 |
| N18V8 | NTKANVIIAADLLAIDNKT | 499 | AACACAAAGgccAACGTGATCATCgccgccGACCTGCTGgccATCGATAACAAGACC | 500 |
| N19L | CTLFRNKAVHLEVARYV | 501 | TGTACACTGTTCCGGAACAAGGCTGTGCACCTGGAGGTGGCTCGCTACGTG | 502 |
| N19V1 | CAAFRNKAVHAEAARYA | 503 | TGTgccgccTTCcggaacaaggctgtgcacgccGAGgccGCTCGCTACgcc | 504 |
| N19V2 | ATLARNKAVHLAVVAYV | 505 | gccACACTGgcccggaacaaggctgtgcacCTGgccGTGgtggccTACGTG | 506 |
| N19R | HAYINDIAEVNSYFQLYHY | 507 | CACGCCTACATCAACGACATCGCCGAGGTGAACTCCTACTTTCAGCTGTACCACTAC | 508 |
| N19V3 | AVYIAAIAEVNAYFQLYHY | 509 | gccgtgTACATCgccgccATCGCCGAGGTGAACgccTACTTTCAGCTGTACCACTAC | 510 |
| N19V4 | HAYINDIAEAASYFAAYAY | 511 | CACGCCTACATCAACGACATCGCCGAGgccgccTCCTACTTTgccgccTACgccTAC | 512 |
| N19V5 | HAYANDAVAVNSYAQLYHY | 513 | CACGCCTACgccAACGACgccgtggccGTGAACTCCTACgccCAGCTGTACCACTAC | 514 |
| N20L | IMQRIIMNERYEKSSGK | 515 | ATCATGCAGAGGATCATCATGAACGAGAGATACGAGAAGTCTAGCGGCAAG | 516 |
| N20V1 | IMQRIIMNERYEAAAGA | 517 | ATCATGCAGAGGATCATCATGAACGAGAGATACGAGgccgccgccGGCgcc | 518 |
| N20V2 | IAARIIMAERYEKSSAK | 519 | ATCgccgccAGGATCATCATGgccGAGAGATACGAGAAGTCTAGCgccAAG | 520 |
| N20V3 | AMQRAAANERYEKSSGK | 521 | gccATGCAGAGGgccgccgccAACGAGAGATACGAGAAGTCTAGCGGCAAG | 522 |
| N20V4 | IMQAIIMNAAYAKSSGK | 523 | ATCATGCAGgccATCATCATGAACgccgccTACgccAAGTCTAGCGGCAAG | 524 |
| N20-Y900A | IMQRIIMNERAEKSSGK | 525 | ATCATGCAGAGGATCATCATGAACGAGAGAgccGAGAAGTCTAGCGGCAAG | 526 |
| N20R | VSEYFDAVNDEKKYNDRLL | 527 | GTGTCTGAGTACTTCGACGCCGTGAACGATGAGAAGAAGTACAACGATAGACTGCTG | 528 |
| N20V5 | AAEYFAAVNDEAAYNDRLL | 529 | gccgccGAGTACTTCgccGCCGTGAACGATGAGgccgccTACAACGATAGACTGCTG | 530 |
| N20V6 | VSEYFDAVAAEKKYAARLL | 531 | GTGTCTGAGTACTTCGACGCCGTGgccgccGAGAAGAAGTACgccgccAGACTGCTG | 532 |
| N20V7 | VSEYADAANDEKKYNDRAA | 533 | GTGTCTGAGTACgccGACGCCgccAACGATGAGAAGAAGTACAACGATAGAgccgcc | 534 |
| N20V8 | VSAYFDVVNDAKKYNDALL | 535 | GTGTCTgccTACTTCGACgtgGTGAACGATgccAAGAAGTACAACGATgccCTGCTG | 536 |
| N20-Y910A | VSEAFDAVNDEKKYNDRLL | 537 | GTGTCTGAGgccTTCGACGCCGTGAACGATGAGAAGAAGTACAACGATAGACTGCTG | 538 |
| N20-Y920A | VSEYFDAVNDEKKANDRLL | 539 | GTGTCTGAGTACTTCGACGCCGTGAACGATGAGAAGAAGgccAACGATAGACTGCTG | 540 |
| N21L | KLLCVPFGYCIPRFKNL | 541 | AAGCTGCTGTGCGTGCCTTTCGGATACTGTATCCCACGGTTTAAGAACCTG | 542 |
| N21V1 | ALLCAPFAYCIPRFAAL | 543 | gccCTGCTGTGCgccCCTTTCgccTACTGTATCCCACGGTTTgccgccCTG | 544 |
| N21V2 | KAAAVPFGYAIPRFKNA | 545 | AAGgccgccgccGTGCCTTTCGGATACgccATCCCACGGTTTAAGAACgcc | 546 |
| N21V3 | KLLCVPAGYCAPAAKNL | 547 | AAGCTGCTGTGCGTGCCTgccGGATACTGTgccCCAgccgccAAGAACCTG | 548 |
| N21-Y934A | KLLCVPFGACIPRFKNL | 549 | AAGCTGCTGTGCGTGCCTTTCGGAgccTGTATCCCACGGTTTAAGAACCTG | 550 |
| N21R | SIEALFDRNEAAKFDKEKK | 551 | AGCATCGAGGCCCTGTTCGACCGCAACGAGGCTGCCAAGTTTGATAAGGAGAAGAAG | 552 |
| N21V4 | AAEALFDRNEAAAFDAEAK | 553 | gccgccGAGGCCCTGTTCGACCGCAACGAGGCTGCCgccTTTGATgccGAGgccAAG | 554 |
| N21V5 | SIEAAFARAEAAKFAKEKA | 555 | AGCATCGAGGCCgccTTCgccCGCgccGAGGCTGCCAAGTTTgccAAGGAGAAGgcc | 556 |
| N21V6 | SIAALADRNAAAKADKAKK | 557 | AGCATCgccGCCCTGgccGACCGCAACgccGCTGCCAAGgccGATAAGgccAAGAAG | 558 |
| N21V7 | SIEVLFDANEVVKFDKEKK | 559 | AGCATCGAGgtgCTGTTCGACgccAACGAGgtggtgAAGTTTGATAAGGAGAAGAAG | 560 |

[0506] Using the EGFP-mCherry dual-fluorescence reporter system of the invention, these Cas13d mutants were functionally screened to assess their collateral vs. gRNA-guided cleavage activities. Specifically, according to standard cell culture methods, human HEK293 cells were grown in 24-well tissue culture plates to a suitable density before the cells were transfected with PEI reagents and plasmids that express each mutant Cas13d and the reporter system fluorescent proteins. Transfected cells were cultured at 37° C. in incubator under 5% CO₂ for about 48 hours, before measuring EGFP and mCherry signals in the cells with FACS. Mutants leading to low percentage of the gRNA-targeted EGFP signal (lower percentage of EGFP cells, as a readout for preserved gRNA-guided cleavage) and high percentage of non-targeted mCherry signal (higher percentage of mCherry⁺ cells, as a readout for lacking collateral effect) were selected.

[0507] In this experiment, dCas13d with no gRNA-guided cleavage was used as a negative control, and the results (mean±s.e.m.) were normalized against that of dCas13d and listed below. Cas13d mutants located at the upper left area of FIG. 17D had low collateral effect (high mCherry signal) and high gRNA-guided cleavage activity (low EGFP signal), and were selected as the desired low/no collateral effect mutants.

| Variants | % mCherry | S.E.M. | % EGFP | S.E.M. |
|---|---|---|---|---|
| dead | 1.0000 | 0.0425 | 1.0000 | 0.0886 |
| N1V5 | 0.6944 | 0.0030 | 0.5137 | 0.0136 |
| N1V6 | 0.7138 | 0.0350 | 0.6954 | 0.0302 |
| N1V7 | 1.0235 | 0.0119 | 0.1633 | 0.0044 |
| N1-Y79A | 0.3946 | 0.0098 | 0.0612 | 0.0029 |
| N1-Y107A | 0.6085 | 0.0196 | 0.0399 | 0.0044 |
| N2V1 | 1.0472 | 0.0355 | 0.6814 | 0.0165 |
| N2V4 | 1.0681 | 0.0834 | 0.3169 | 0.0355 |
| N2V5 | 1.0812 | 0.0220 | 0.4743 | 0.0129 |
| N2V6 | 0.7921 | 0.0201 | 0.7409 | 0.0159 |
| N2V7 | 1.1137 | 0.0111 | 0.1874 | 0.0039 |
| N2V8 | 1.0213 | 0.0197 | 0.1071 | 0.0023 |
| N2-Y136A | 0.2408 | 0.0114 | 0.0436 | 0.0026 |
| N2-Y142A | 0.1079 | 0.0139 | 0.0250 | 0.0029 |
| N3V5 | 0.2427 | 0.0119 | 0.0577 | 0.0022 |
| N3V6 | 0.5665 | 0.0230 | 0.1849 | 0.0034 |
| N3V7 | 0.8830 | 0.0081 | 0.2485 | 0.0053 |
| N3V8 | 0.2536 | 0.0247 | 0.0585 | 0.0075 |
| N3-Y164A | 0.3370 | 0.0123 | 0.0742 | 0.0052 |
| N3-Y166A | 0.1793 | 0.0030 | 0.0475 | 0.0020 |
| N4V1 | 0.2415 | 0.0153 | 0.0587 | 0.0041 |
| N4V2 | 0.1311 | 0.0091 | 0.0361 | 0.0040 |
| N4V3 | 0.9933 | 0.0289 | 0.3581 | 0.0060 |
| N4V4 | 0.3196 | 0.0063 | 0.1217 | 0.0048 |
| N4V5 | 0.3593 | 0.0214 | 0.1291 | 0.0065 |
| N4V6 | 0.2651 | 0.0237 | 0.0838 | 0.0063 |
| N4V7 | 1.1946 | 0.0104 | 1.0324 | 0.0118 |
| N4V8 | 0.3752 | 0.0167 | 0.1662 | 0.0017 |
| N4-Y193A | 0.0574 | 0.0036 | 0.0166 | 0.0005 |
| N4-Y207A | 0.3814 | 0.0204 | 0.1544 | 0.0096 |
| N4-Y220A | 0.1474 | 0.0147 | 0.0467 | 0.0010 |
| N5V2 | 0.9947 | 0.0316 | 0.9101 | 0.0192 |
| N5V3 | 0.7067 | 0.0282 | 0.3204 | 0.0136 |
| N5V4 | 0.5716 | 0.0059 | 0.6033 | 0.0110 |
| N5V5 | 0.5197 | 0.0176 | 0.4348 | 0.0201 |
| N5V6 | 0.9243 | 0.0507 | 0.8826 | 0.0495 |
| N6V1 | 0.2098 | 0.0045 | 0.0428 | 0.0015 |
| N6V2 | 0.5046 | 0.0070 | 0.2333 | 0.0027 |
| N6V3 | 1.0075 | 0.0473 | 0.4041 | 0.0199 |
| N6V4 | 0.2384 | 0.0164 | 0.0589 | 0.0027 |
| N6V5 | 0.2539 | 0.0225 | 0.0463 | 0.0050 |
| N6V6 | 0.6378 | 0.0164 | 0.2087 | 0.0076 |
| N6-Y258A | 0.1685 | 0.0098 | 0.0340 | 0.0019 |
| N6-Y268A | 0.2055 | 0.0144 | 0.0337 | 0.0040 |
| N6-Y274A | 0.1093 | 0.0084 | 0.0431 | 0.0053 |
| N6-Y276A | 0.1765 | 0.0068 | 0.0268 | 0.0007 |
| N7V1 | 0.4020 | 0.0294 | 0.1129 | 0.0124 |
| N7V2 | 0.6559 | 0.0501 | 0.1955 | 0.0242 |
| N7V3 | 0.4149 | 0.0176 | 0.0678 | 0.0038 |
| N7V5 | 0.5322 | 0.0248 | 0.1516 | 0.0047 |
| N7V6 | 1.1491 | 0.0626 | 0.9620 | 0.0413 |
| N7V7 | 0.6734 | 0.0047 | 0.1279 | 0.0036 |
| N7-Y313A | 0.1675 | 0.0041 | 0.0414 | 0.0052 |
| N8V5 | 0.6363 | 0.0040 | 0.5539 | 0.0063 |
| N8V6 | 0.6094 | 0.0110 | 0.0607 | 0.0025 |
| N8V7 | 0.7593 | 0.0095 | 0.6963 | 0.0074 |
| N8V8 | 0.5880 | 0.0313 | 0.1175 | 0.0058 |
| N8-Y470A | 0.1578 | 0.0151 | 0.0333 | 0.0038 |
| N10V1 | 0.7056 | 0.0148 | 0.0883 | 0.0024 |
| N10V2 | 0.6709 | 0.0184 | 0.1958 | 0.0097 |
| N10V3 | 0.6918 | 0.0062 | 0.1564 | 0.0030 |
| N10V5 | 0.3373 | 0.0124 | 0.1240 | 0.0027 |
| N10V6 | 0.9103 | 0.0382 | 0.4576 | 0.0164 |
| N10V7 | 0.1631 | 0.0038 | 0.0421 | 0.0016 |
| N10V8 | 1.0088 | 0.0406 | 0.9699 | 0.0412 |
| N10-Y549A | 0.2203 | 0.0221 | 0.0355 | 0.0053 |
| N10-Y562A | 0.2138 | 0.0076 | 0.0585 | 0.0022 |
| N12V4 | 0.2121 | 0.0075 | 0.0622 | 0.0041 |
| N12V5 | 0.2084 | 0.0052 | 0.0559 | 0.0009 |
| N12V6 | 1.1298 | 0.0204 | 0.5600 | 0.0041 |
| N12V7 | 0.3140 | 0.0038 | 0.0877 | 0.0006 |
| N12-Y604A | 0.1026 | 0.0063 | 0.0295 | 0.0031 |
| N12-Y608A | 0.4104 | 0.0354 | 0.1335 | 0.0082 |
| N14V4 | 0.4622 | 0.0199 | 0.1333 | 0.0087 |
| N14V5 | 0.6140 | 0.0077 | 0.1030 | 0.0031 |
| N14V7 | 0.3355 | 0.0104 | 0.0715 | 0.0004 |
| N14V8 | 0.5707 | 0.0551 | 0.1178 | 0.0094 |
| N14-Y678A | 0.2015 | 0.0173 | 0.0533 | 0.0047 |
| N14-Y708A | 0.1704 | 0.0230 | 0.0398 | 0.0064 |
| N15V1 | 1.0982 | 0.0189 | 1.0183 | 0.0056 |
| N15V2 | 0.7958 | 0.0491 | 0.4995 | 0.0347 |
| N15V4 | 0.7434 | 0.0150 | 0.1105 | 0.0009 |
| N15V5 | 1.0056 | 0.0542 | 1.0385 | 0.0531 |
| N15V6 | 0.9459 | 0.0122 | 0.9455 | 0.0077 |
| N15V7 | 0.8743 | 0.0518 | 0.7983 | 0.0359 |
| N16V1 | 1.0441 | 0.1104 | 1.0276 | 0.0977 |
| N16V2 | 0.8223 | 0.0433 | 0.6325 | 0.0331 |
| N16V3 | 1.0045 | 0.0297 | 0.8040 | 0.0213 |
| N16V4 | 0.7497 | 0.0677 | 0.7392 | 0.0657 |
| N16V5 | 0.6495 | 0.0252 | 0.1833 | 0.0070 |
| N16V6 | 0.1595 | 0.0093 | 0.1385 | 0.0119 |
| N16V7 | 0.4297 | 0.0256 | 0.1954 | 0.0090 |
| N16V8 | 0.2295 | 0.0024 | 0.0254 | 0.0042 |
| N17V4 | 0.3182 | 0.0174 | 0.1440 | 0.0018 |
| N17V6 | 0.4076 | 0.0189 | 0.1893 | 0.0040 |
| N17V7 | 0.2092 | 0.0116 | 0.1455 | 0.0079 |
| N17V8 | 0.7403 | 0.0033 | 0.5776 | 0.0037 |
| N18V1 | 0.8710 | 0.0153 | 0.7702 | 0.0074 |
| N18V2 | 1.2026 | 0.0283 | 1.2085 | 0.0246 |
| N18V3 | 1.0737 | 0.0466 | 1.1575 | 0.0477 |
| N18V4 | 1.1469 | 0.0504 | 1.1692 | 0.0551 |
| N18V6 | 1.1131 | 0.0067 | 0.9995 | 0.0067 |
| N18V7 | 0.5502 | 0.0181 | 0.2434 | 0.0123 |
| N18V8 | 0.7309 | 0.0558 | 0.6676 | 0.0489 |
| N19V1 | 0.4616 | 0.0227 | 0.0838 | 0.0031 |
| N19V4 | 1.0292 | 0.0306 | 0.9443 | 0.0407 |
| N19V5 | 0.8482 | 0.0214 | 0.7707 | 0.0153 |
| N20V4 | 0.7122 | 0.0163 | 0.5587 | 0.0153 |
| N20V6 | 0.8172 | 0.0039 | 0.4597 | 0.0106 |
| N20V7 | 0.7701 | 0.0168 | 0.5945 | 0.0171 |
| N20-Y900A | 0.3975 | 0.0116 | 0.0266 | 0.0036 |
| N20-Y910A | 0.8119 | 0.0323 | 0.4698 | 0.0239 |
| N20-Y920A | 0.8056 | 0.0186 | 0.6471 | 0.0246 |
| N21V1 | 0.6641 | 0.0068 | 0.4461 | 0.0063 |
| N21V4 | 0.2457 | 0.0149 | 0.0741 | 0.0044 |
| N21V5 | 0.9092 | 0.0599 | 0.5882 | 0.0402 |
| N21V6 | 1.2034 | 0.0539 | 0.7407 | 0.0211 |
| N21V7 | 0.1188 | 0.0074 | 0.0249 | 0.0016 |
| N21-Y934A | 0.8336 | 0.0313 | 0.7271 | 0.0276 |
| WT | 0.1446 | 0.0030 | 0.0410 | 0.0022 |

[0508] After normalization of EGFP and mCherry fluorescence intensity by inactive dead Cas13d (dCas13d with R295A, H300A, R849A, and H854A mutations in HEPN domains), it was found that variants with mutation sites in N1, N2, N3, or N15, specially N1V7, N2V7, N2V8, N3V7, and N15V4, exhibited relatively low EGFP fluorescence intensity but high mCherry fluorescence intensity, indicating that these variants retained a high on-target activity but greatly reduced collateral activity (FIG. 17D).

[0509] Overall, these mutants exhibited less than 27.5% collateral effect (e.g., ≥72.5% mCherry⁺ cells), and ≥75% gRNA-guided cleavage (≤25% EGFP⁺ cells). They include: N1V7, N2V7, N2V8, N3V7, and N15V4, etc. (see above table and FIG. 17D). Based on FACS data (not shown), these mutants have significantly reduced collateral effect compared to wild-type.

[0510] Further, some of the Cas13d mutants exhibited low collateral effect (e.g., ≤27.5% collateral effect, or ≥72.5% mCherry⁺ cells), and intermediate gRNA-guided cleavage (e.g., 25%≤EGFP⁺ cells≤75%), including: N2V4, N2V5, N4V3, N6V3, N10V6, N15V2, N20V6, and N20-Y910A, etc. (see above table and FIG. 17D). The gRNA-guided cleavage efficiency for these mutants can be enhanced further by, for example, using multiple gRNA targeting different sites of the target sequence, and the collateral effect would remain low.

[0511] In other words, the invention has provided mutants having substantially retained (e.g., retaining at least about 50%, 60%, 70%, 80%, 85%, 90%, 95%, 96%, 97%, 98%, or 99%) wild-type level gRNA-guided cleavage, while substantially reducing/eliminating (at least about 72.5%, 75%, 80%, 85%, 90%, 95%, 96%, 97%, 98%, 99%, or 100%) Cas13d collateral effect.

[0512] Since N2V7 and N2V8 retained relatively high guide RNA-specific cleavage, with essentially eliminated Cas13d collateral effect, and the residues affected by these mutants are very close together, further mutagenesis study in the two regions of these mutants was conducted, by generating a number of additional mutants with single, double, triple, or quadruple combination mutations. The sequences of these mutants and the corresponding wild-type sequences (N2C) are listed below:

| | | SEQ | | SEQ |
|---|---|---|---|---|
| | | ID | | ID |
| Variants | Amino Acids | NO: | DNA | NO: |
| N2C | ILAEYITNAAYAVNNIS | 561 | ATCCTGGCTGAGTACATCACAAACGCCGCTTACGCCGTGAAC | 562 |
| | | | AACATCTCC | |
| I132A | ALAEYITNAAYAVNNIS | 563 | gccCTGGCTGAGTACATCACAAACGCCGCTTACGCCGTGAAC | 564 |
| | | | AACATCTCC | |
| L133A | IAAEYITNAAYAVNNIS | 565 | ATCgccGCTGAGTACATCACAAACGCCGCTTACGCCGTGAAC | 566 |
| | | | AACATCTCC | |
| A134V | ILVEYITNAAYAVNNIS | 567 | ATCCTGgccGAGTACATCACAAACGCCGCTTACGCCGTGAAC | 568 |
| | | | AACATCTCC | |
| E135A | ILAAYITNAAYAVNNIS | 569 | ATCCTGGCTgccTACATCACAAACGCCGCTTACGCCGTGAAC | 570 |
| | | | AACATCTCC | |
| I137A | ILAEYATNAAYAVNNIS | 571 | ATCCTGGCTGAGTACgccACAAACGCCGCTTACGCCGTGAAC | 572 |
| | | | AACATCTCC | |
| T138A | ILAEYIANAAYAVNNIS | 573 | ATCCTGGCTGAGTACATCgccAACGCCGCTTACGCCGTGAAC | 574 |
| | | | AACATCTCC | |
| N139A | ILAEYITAAAYAVNNIS | 575 | ATCCTGGCTGAGTACATCACAgccGCCGCTTACGCCGTGAAC | 576 |
| | | | AACATCTCC | |
| Al40V | ILAEYITNVAYAVNNIS | 577 | ATCCTGGCTGAGTACATCACAAACgtgGCTTACGCCGTGAAC | 578 |
| | | | AACATCTCC | |
| A141V | ILAEYITNAVYAVNNIS | 579 | ATCCTGGCTGAGTACATCACAAACGCCgtgTACGCCGTGAAC | 580 |
| | | | AACATCTCC | |
| Al43V | ILAEYITNAAYVVNNIS | 581 | ATCCTGGCTGAGTACATCACAAACGCCGCTTACgtgGTGAAC | 582 |
| | | | AACATCTCC | |
| V144A | ILAEYITNAAYAANNIS | 583 | ATCCTGGCTGAGTACATCACAAACGCCGCTTACGCCgccAAC | 584 |
| | | | AACATCTCC | |
| N145A | ILAEYITNAAYAVANIS | 585 | ATCCTGGCTGAGTACATCACAAACGCCGCTTACGCCGTGgcc | 586 |
| | | | AACATCTCC | |
| N146A | ILAEYITNAAYAVNAIS | 587 | ATCCTGGCTGAGTACATCACAAACGCCGCTTACGCCGTGAAC | 588 |
| | | | gccATCTCC | |
| I147A | ILAEYITNAAYAVNNAS | 589 | ATCCTGGCTGAGTACATCACAAACGCCGCTTACGCCGTGAAC | 590 |
| | | | AACgccTCC | |
| S148A | ILAEYITNAAYAVNNIA | 591 | ATCCTGGCTGAGTACATCACAAACGCCGCTTACGCCGTGAAC | 592 |
| | | | AACATCgcc | |
| N2D1 | ALAAYATNAAYAVNNIS | 593 | gccCTGGCTgccTACgccACAAACGCCGCTTACGCCGTGAAC | 594 |
| | | | AACATCTCC | |
| N2D2 | ALAAYITNAAYAVNNAS | 595 | gccCTGGCTgccTACATCACAAACGCCGCTTACGCCGTGAAC | 596 |
| | | | AACgccTCC | |
| N2D3 | ALAEYATNAAYAVNNAS | 597 | gccCTGGCTGAGTACgccACAAACGCCGCTTACGCCGTGAAC | 598 |
| | | | AACgccTCC | |
| N2D4 | ILAAYATNAAYAVNNAS | 599 | ATCCTGGCTgccTACgccACAAACGCCGCTTACGCCGTGAAC | 600 |
| | | | AACgccTCC | |
| N2D5 | ALAAYITNAAYAVNNIS | 601 | gccCTGGCTgccTACATCACAAACGCCGCTTACGCCGTGAAC | 602 |
| | | | AACATCTCC | |
| N2D6 | ALAEYATNAAYAVNNIS | 603 | gccCTGGCTGAGTACgccACAAACGCCGCTTACGCCGTGAAC | 604 |
| | | | AACATCTCC | |
| N2D7 | ALAEYITNAAYAVNNAS | 605 | gccCTGGCTGAGTACATCACAAACGCCGCTTACGCCGTGAAC | 606 |
| | | | AACgccTCC | |
| N2D8 | ILAAYATNAAYAVNNIS | 607 | ATCCTGGCTgccTACgccACAAACGCCGCTTACGCCGTGAAC | 608 |
| | | | AACATCTCC | |
| N2D9 | ILAAYITNAAYAVNNAS | 609 | ATCCTGGCTgccTACATCACAAACGCCGCTTACGCCGTGAAC | 610 |
| | | | AACgccTCC | |
| N2D10 | ILAEYATNAAYAVNNAS | 611 | ATCCTGGCTGAGTACgccACAAACGCCGCTTACGCCGTGAAC | 612 |
| | | | AACgccTCC | |
| N2D11 | ILVEYITNVVYAVNNIS | 613 | ATCCTGgtgGAGTACATCACAAACgtggtgTACGCCGTGAAC | 614 |
| | | | AACATCTCC | |
| N2D12 | ILVEYITNVAYVVNNIS | 615 | ATCCTGgtgGAGTACATCACAAACgtgGCTTACgtgGTGAAC | 616 |
| | | | AACATCTCC | |
| N2D13 | ILVEYITNAVYVVNNIS | 617 | ATCCTGgtgGAGTACATCACAAACGCCgtgTACgtgGTGAAC | 618 |
| | | | AACATCTCC | |
| N2D14 | ILAEYITNVVYVVNNIS | 619 | ATCCTGGCTGAGTACATCACAAACgtggtgTACgtgGTGAAC | 620 |
| | | | AACATCTCC | |
| N2D15 | ILVEYITNVAYAVNNIS | 621 | ATCCTGgtgGAGTACATCACAAACgtgGCTTACGCCGTGAAC | 622 |
| | | | AACATCTCC | |
| N2D16 | ILVEYITNAVYAVNNIS | 623 | ATCCTGgtgGAGTACATCACAAACGCCgtgTACGCCGTGAAC | 624 |
| | | | AACATCTCC | |
| N2D17 | ILVEYITNAAYVVNNIS | 625 | ATCCTGgtgGAGTACATCACAAACGCCGCTTACgtgGTGAAC | 626 |
| | | | AACATCTCC | |
| N2D18 | ILAEYITNVVYAVNNIS | 627 | ATCCTGGCTGAGTACATCACAAACgtggtgTACGCCGTGAAC | 628 |
| | | | AACATCTCC | |
| N2D19 | ILAEYITNVAYVVNNIS | 629 | ATCCTGGCTGAGTACATCACAAACgtgGCTTACgtgGTGAAC | 630 |
| | | | AACATCTCC | |
| N2D20 | ILAEYITNAVYVVNNIS | 631 | ATCCTGGCTGAGTACATCACAAACGCCgtgTACgtgGTGAAC | 632 |
| | | | AACATCTCC | |
| N2T | ALAAYITNAAYVVNNIS | 633 | gccCTGGCTgccTACATCACAAACGCCGCTTACgtgGTGAAC | 634 |
| | | | AACATCTCC | |
| N2Q | ALVAYITNAAYVVNNIS | 635 | gccCTGgtggccTACATCACAAACGCCGCTTACgtgGTGAAC | 636 |
| | | | AACATCTCC | |

[0513] Using the same assay above, and after normalizing the data with that of the dCas13d, mutants occupying the upper left corner of FIG. 17E were selected.

| Variants | % mCherry | S.E.M. | % EGFP | S.E.M. |
|---|---|---|---|---|
| dead | 1.0000 | 0.0153 | 1.0000 | 0.0305 |
| N2V7 | 1.0011 | 0.0539 | 0.0873 | 0.0076 |
| N2V8 | 0.9161 | 0.0259 | 0.0830 | 0.0039 |
| I132A | 0.6851 | 0.0050 | 0.0695 | 0.0065 |
| L133A | 0.1880 | 0.0048 | 0.0393 | 0.0004 |
| A134V | 0.3450 | 0.0136 | 0.0714 | 0.0060 |
| E135A | 0.4479 | 0.0280 | 0.0597 | 0.0057 |
| Y136A | 0.2225 | 0.0125 | 0.0454 | 0.0035 |
| I137A | 0.2187 | 0.0036 | 0.0418 | 0.0022 |
| T138A | 0.2702 | 0.0077 | 0.0426 | 0.0020 |
| N139A | 0.2152 | 0.0029 | 0.0346 | 0.0002 |
| A140V | 0.1912 | 0.0019 | 0.0355 | 0.0021 |
| A141V | 0.2454 | 0.0052 | 0.0472 | 0.0021 |
| Y142A | 0.1775 | 0.0029 | 0.0375 | 0.0043 |
| A143V | 0.5235 | 0.0087 | 0.0644 | 0.0057 |
| VI44 A | 0.2001 | 0.0027 | 0.0413 | 0.0036 |
| N145A | 0.3230 | 0.0152 | 0.0489 | 0.0032 |
| N146A | 0.1269 | 0.0013 | 0.0299 | 0.0012 |
| I147A | 0.1410 | 0.0067 | 0.0238 | 0.0026 |
| S148A | 0.1338 | 0.0042 | 0.0233 | 0.0007 |
| N2D1 | 0.8383 | 0.0187 | 0.3122 | 0.0250 |
| N2D2 | 0.7241 | 0.0239 | 0.0658 | 0.0056 |
| N2D3 | 0.1554 | 0.0064 | 0.0446 | 0.0039 |
| N2D4 | 0.0757 | 0.0072 | 0.0353 | 0.0010 |
| N2D5 | 0.8970 | 0.0302 | 0.1234 | 0.0112 |
| N2D6 | 0.3629 | 0.0264 | 0.0552 | 0.0079 |
| N2D7 | 0.1019 | 0.0100 | 0.0470 | 0.0058 |
| N2D8 | 0.1102 | 0.0040 | 0.0284 | 0.0039 |
| N2D9 | 0.0397 | 0.0050 | 0.0181 | 0.0017 |
| N2D10 | 0.0347 | 0.0054 | 0.0260 | 0.0016 |
| N2D11 | 0.1137 | 0.0153 | 0.0467 | 0.0023 |
| N2D12 | 0.9867 | 0.0286 | 0.2198 | 0.0047 |
| N2D13 | 0.4308 | 0.0376 | 0.0542 | 0.0066 |
| N2D14 | 0.1901 | 0.0189 | 0.0571 | 0.0019 |
| N2D15 | 0.0314 | 0.0023 | 0.0155 | 0.0003 |
| N2D16 | 0.0847 | 0.0035 | 0.0327 | 0.0016 |
| N2D17 | 0.8968 | 0.0271 | 0.1044 | 0.0088 |
| N2D18 | 0.0443 | 0.0022 | 0.0264 | 0.0016 |
| N2D19 | 0.5594 | 0.0338 | 0.0866 | 0.0103 |
| N2D20 | 0.1364 | 0.0084 | 0.0461 | 0.0014 |
| N2T | 0.7398 | 0.0150 | 0.5906 | 0.0122 |
| N2Q | 0.7333 | 0.0115 | 0.6117 | 0.0048 |
| WT | 0.0789 | 0.0070 | 0.0156 | 0.0036 |

[0514] Based on comprehensive analysis of all these mutants, N2V8 (carrying A134V, A140V, A141V, A143V) was believed to has superior characteristics, in that it retained relatively high guide RNA-specific cleavage, while essentially eliminated Cas13d collateral effect. See data above and FIGS. 17D and 17E. This mutant is sometimes referred to as cfCas13d (collateral free Cas13d) for further functional characterization.

[0515] Based on the structure of Cas13d and PyMOL visualization, it was identified that the mutation sites of various effective variants were mainly located in a-helix proximal to catalytic sites of two HEPN domains (RXXXXH-1, RXXXXH-2) (FIGS. 18A-18C), especially for mutants N1V7, N2V7, N2V8, and N15V4. See FIGS. 18A-18C. It is believed that residues in these regions may have participated in binding between Cas13d to the target RNA and/or the non-specific RNA, and mutations in these residues had different/differential effects on Cas13d affinity towards different RNA targets, hence the cleavage efficiency towards these RNA targets.

[0516] The identified desired Cas13d mutants with reduced/eliminated collateral effects seem to share the following characteristics:

[0517] 1. mutations are mainly located within the HEPN1-1 domain (e.g., residues 90-292), Helical2 domain (e.g., residues 536-690), and the HEPN2 domain (e.g., residues 690-967 in Cas13d).

[0518] 2. in Cas13d, mutations are located within 170 residues of the RXXXXH motif.

[0519] 3. most mutations, in 3D structure, are in the vicinity of the catalytic activity site formed by the RXXXXH motifs of HEPN1 and HEPN2 domains.

[0520] 4. for each mutated residue, substitutions by residues other than Ala (especially Val, Gly, and Ile), are similarly effective to reduce/eliminate collateral effect.

[0521] Certain specific positions of the desired mutants in Cas13d are listed below:

| | | | SEQ |
|---|---|---|---|
| | | | ID |
| Variants | Mutations | Amino Acids | NO: |
| N1R | | QDMLGLKETLEKRYFGESA | 117 |
| N1V7 | E104A, R106A, E110A, A112V | QDMLGLKETLAKAYFGASV | 125 |
| N2L | | DGNDNICIQVIHNILDI | 129 |
| N2V4 | I120A, I123A, I126A, I129A | DGNDNICAQVAHNALDA | 137 |
| N2R | | EKILAEYITNAAYAVNNIS | 139 |
| N2V5 | E130A, K131A, T138A, N139A, S148A | AAILAEYIAAAAYAVNNIA | 141 |
| N2V7 | I132A, E135A, I137A, I147A | EKALAAYATNAAYAVNNAS | 145 |
| N2V8 | A134V, A140V, A141V, A143V | EKILVEYITNVVYVVNNIS | 147 |
| N3R | | YDEFKDPEHHRAAFNNNDK | 165 |
| N3V7 | E168A, F169A, H175A, F179A | YDAAKDPEHARAAANNNDK | 171 |
| N4L | | LINAIKAQYDEFDNFLD | 177 |
| N4V3 | I186A, I189A, F196A, L200A | LANAAKAQYDEADNFAD | 183 |
| N6L | | LYNLDKNLDNEYISTLN | 219 |
| N6V3 | L260A, L264A, E267A, I269A, L272A | LYNADKNADNAYASTAN | 225 |
| N10R | | AMYIDAIRILGTNLSYDEL | 321 |
| N10V6 | D551A, L556A, N559A, D563A | AMYIAAIRIAGTALSYAEL | 325 |
| N15L | | TVIYHILKNIVNINARY | 423 |
| N15V2 | V711A, I712A, H714A, L716A, V720A | TAAYAIAKNIANINARY | 427 |
| N15R | | VIGFHCVERDAQLYKEKGY | 431 |
| N15V4 | V727A, I728A, G729A, K741A, K743A | AAAFHCVERDAQLYAEAGY | 433 |
| N20R | | VSEYFDAVNDEKKYNDRLL | 527 |
| N20V6 | N915A, D916A, N921A, D922A | VSEYFDAVAAEKKYAARLL | 531 |
| N20-Y910A | Y910A | VSEAFDAVNDEKKYNDRLL | 537 |

[0522] Interestingly, the majority of variants exhibited either low dual cleavage activity (upper right in FIG. 17D) or high on-target cleavage activity but low collateral cleavage activity (upper left in FIG. 17D). However, there is almost no variants showing low on-target cleavage activity but high collateral cleavage activity (bottom right in FIG. 17D). These results suggest a distinct binding mechanism between on-target and collateral cleavage activity.

[0523] To confirm the elimination of collateral effects by cfCas13d, EGFP was targeted with other three different gRNAs, and substantial collateral effects was found to be induced by the wild-type Cas13d, but essentially no collateral effects were induced by cfCas13d (FIG. 17F).

[0524] Next, in vitro cleavage activities of purified Cas13d and cfCas13d proteins on targeted RNAs, in the presence of non-targeted single-strand RNA probes, were investigated. It was found that cfCas13d exhibited consistently efficient on-target activity with essentially no collateral cleavage, whereas wild-type Cas13d showed notable collateral activity (FIGS. 17G and 17H). These results further demonstrated that collateral effects were largely eliminated by cfCas13d.

[0525] On the other hand, the above screening also produced multiple mutants with significantly enhanced collateral effect, based on ≥87.5% collateral cleavage efficiency (e.g., ≤12.5% mCherry⁺ cells) and better gRNA-guided cleavage compared to wild-type (e.g., ≤4% EGFP⁺ cells). These mutants include: N2-Y142A, N4-Y193A, N12-Y604A, N21V7, etc. Among them, N2-Y142A is located in the Helical2 domain, extending towards the two HEPN domains in the 3D structure. Meanwhile, N4-Y193A and N21V7 are within the HEPN1 and HEPN2 domains, respectively, and are relatively far away from the catalytic active site. The residues involved in these mutants are listed below.

| | | | SEQ |
|---|---|---|---|
| | | | ID |
| Variants | Mutations | Amino Acids | NO |
| N2R | | EKILAEYITNAAYAVNNIS | 139 |
| N2-Y142A | Y142A | EKILAEYITNAAAAVNNIS | 151 |
| N4L | | LINAIKAQYDEFDNFLD | 177 |
| N4-Y193A | Y193A | LINAIKAQADEFDNFLD | 187 |
| N12L | | FHYLIRYGDPAHLHEIA | 355 |
| N12-Y604A | Y604A | FHALIRYGDPAHLHEIA | 363 |
| N21R | | SIEALFDRNEAAKFDKEKK | 551 |
| N21V7 | A946V, R950A, | SIEVLFDANEVVKFDKEKK | 559 |
| | A953V, A954V | | |

[0526] It should be understood that, although Ala was used in the mutagenesis studies herein, other substitutions at the same positions (especially those with small (alky) side chains such as Val or Ile, or Gly), also have similar effects as Ala substitution. These mutations are expressly contemplated and disclosed herein, and are within the scope of the invention.

### Example 5 Eliminating Collateral Effects of Cas13e through Mutagenesis

[0527] This example provides additional Cas13e mutants with reduced/eliminated collateral effect, based on knowledge of Cas13d mutants screening and simulated structural analysis of Cas13e (see FIG. 19A).

[0528] Specifically, a mutagenesis library was developed for Cas13e, covering HEPN1 and HEPN2 domains (FIG. 19B). At least 90 different mutants were constructed, each comprising 1-5 amino acid residue changes compared to the wild-type sequence. The various Cas13e mutants and the corresponding wild-type sequences (M1-M21) are listed below.

| | | SEQ | | SEQ |
|---|---|---|---|---|
| | | ID | | ID |
| | Amino Acids | NO: | DNA sequence | NO: |
| M1 | RTIMERAYERAIFECRRR | 637 | CGGACCATCATGGAGAGAGCCTATGAGCGGGCCATCTTCGA | 638 |
| | | | GTGCAGAAGAAGA | |
| M1V1 | ATIMEAAYEAAIFECAAR | 639 | gccACCATCATGGAGgccGCCTATGAGgccGCCATCTTCGA | 640 |
| | | | GTGCgccgccAGA | |
| M1V2 | RTIMARAYARAIFECRRA | 641 | CGGACCATCATGgccAGAGCCTATgccCGGGCCATCTTCgc | 642 |
| | | | cTGCAGAAGAgcc | |
| M1V3 | RAIMERAYERAIFEARRR | 643 | CGGgccATCgccGAGAGAGCCTATGAGCGGGCCATCgccGA | 644 |
| | | | GgccAGAAGAAGA | |
| M1V4 | RTAMERVYERVAFECRRR | 645 | CGGACCgccATGGAGAGAgtgTATGAGCGGgtggccTTCGA | 646 |
| | | | GTGCAGAAGAAGA | |
| M1-Y113A | RTIMERAAERAIFECRRR | 647 | CGGACCATCATGGAGAGAGCCgccGAGCGGGCCATCTTCGA | 648 |
| | | | GTGCAGAAGAAGA | |
| M2 | AFEEKVVKAKKMSEKE | 649 | GCTTTCGAAGAGAAGGTGGTGAAGGCCAAGAAGATGAGCGA | 650 |
| | | | GAAGGAA | |
| M2V1 | AFEEAVVAAAAMSEKE | 651 | GCTTTCGAAGAGgccGTGGTGgccGCCgccgccATGAGCGA | 652 |
| | | | GAAGGAA | |
| M2V2 | AFAAKVVKAKKMSAAE | 653 | GCTTTCgccgccAAGGTGGTGAAGGCCAAGAAGATGAGCgc | 654 |
| | | | cgccGAA | |
| M2V3 | AAEEKVVKAKKAAEKA | 655 | GCTgccGAAGAGAAGGTGGTGAAGGCCAAGAAGgccgccGA | 656 |
| | | | GAAGgcc | |
| M2V4 | VFEEKAAKVKKMSEKE | 657 | gtgTTCGAAGAGAAGgcegcCAAGgtgAAGAAGATGAGCGA | 658 |
| | | | GAAGGAA | |
| M3 | VMKKYGIEKEWKFPVK | 659 | GTGATGAAGAAGTACGGCATCGAGAAGGAATGGAAGTTCCC | 660 |
| | | | TGTCAAG | |
| M3V1 | VMAAYGIEAEWAFPVA | 661 | GTGATGgccgccTACGGCATCGAGgccGAATGGgccTTCCC | 662 |
| | | | TGTCgcc | |
| M3V2 | VAKKYGIAKAWKAAVK | 663 | GTGgccAAGAAGTACGGCATCgccAAGgccTGGAAGgccgc | 664 |
| | | | cGTCAAG | |
| M3V3 | AMKKYAAEKEAKFPAK | 665 | gccATGAAGAAGTACgccgccGAGAAGGAAgccAAGTTCCC | 666 |
| | | | TgccAAG | |
| M3-Y764A | VMKKAGIEKEWKFPVK | 667 | GTGATGAAGAAGgccGGCATCGAGAAGGAATGGAAGTTCCC | 668 |
| | | | TGTCAAG | |
| M4 | QVSKQTSKKRELSIDE | 669 | CAGGTGAGCAAGCAGACCTCCAAGAAGAGGGAGCTGAGCAT | 670 |
| | | | CGACGAG | |
| M4V1 | QVSAQTSAAAELSIDE | 671 | CAGGTGAGCgccCAGACCTCCgccgccgccGAGCTGAGCAT | 672 |
| | | | CGACGAG | |
| M4V2 | QVAKQTSKKRALSIAA | 673 | CAGGTGgccAAGCAGACCTCCAAGAAGAGGgccCTGAGCAT | 674 |
| | | | Cgccgcc | |
| M4V3 | AVSKQAAKKRELAIDE | 675 | gccGTGAGCAAGCAGgccgccAAGAAGAGGGAGCTGgccAT | 676 |
| | | | CGACGAG | |
| M4V4 | QASKATSKKREASADE | 677 | CAGgccAGCAAGgccACCTCCAAGAAGAGGGAGgccAGCgc | 678 |
| | | | cGACGAG | |
| M5 | YQGARKWCFTIAFNKA | 679 | TACCAGGGCGCCCGGAAGTGGTGCTTCACCATTGCCTTCAA | 680 |
| | | | CAAGGCC | |
| M5V1 | YQGAAAWCFAIAFAAA | 681 | TACCAGGGCGCCgccgccTGGTGCTTCgccATTGCCTTCgc | 682 |
| | | | cgccGCC | |
| M5V2 | YAGARKAAATIAANKA | 683 | TACgccGGCGCCCGGAAGgccgccgccACCATTGCCgccAA | 684 |
| | | | CAAGGCC | |
| M5V3 | YQAVRKWCFTAVFNKV | 685 | TACCAGgccgtgCGGAAGTGGTGCTTCACCgccgtgTTCAA | 686 |
| | | | CAAGgtg | |
| M5-Y19A | AQGARKWCFTIAFNKA | 687 | gccCAGGGCGCCCGGAAGTGGTGCTTCACCATTGCCTTCAA | 688 |
| | | | CAAGGCC | |
| M6 | LVNRDKNDGLFVESLLR | 16 | CTGGTGAACCGGGACAAGAACGACGGCCTGTTCGTGGAAAG | 18 |
| | | | CCTGCTGAGA | |
| M6V1 | LVNAAANAGLFVESLLA | 689 | CTGGTGAACgccgccgccAACgccGGCCTGTTCGTGGAAAG | 690 |
| | | | CCTGCTGgcc | |
| M6V2 | LVARDKADGLFVAALLR | 691 | CTGGTGgccCGGGACAAGgccGACGGCCTGTTCGTGgccgc | 692 |
| | | | cCTGCTGAGA | |
| M6V3 | LANRDKNDALAAESLLR | 693 | CTGgccAACCGGGACAAGAACGACgccCTGgccgccGAAAG | 694 |
| | | | CCTGCTGAGA | |
| M6V4 | AVNRDKNDGAFVESAAR | 695 | gccGTGAACCGGGACAAGAACGACGGCgccTTCGTGGAAAG | 696 |
| | | | CgccgccAGA | |
| M7 | HEKYSKHDWYDEDTRA | 20 | CACGAGAAGTACAGCAAGCACGACTGGTACGACGAAGATAC | 22 |
| | | | CCGGGCC | |
| M7V1 | AEAYSAADWYDEDTAA | 697 | gccGAGgccTACAGCgccgccGACTGGTACGACGAAGATAC | 698 |
| | | | CgccGCC | |
| M7V2 | HAKYSKHAWYAAATRA | 699 | CACgccAAGTACAGCAAGCACgccTGGTACgccgccgccAC | 700 |
| | | | CCGGGCC | |
| M7V3 | HEKYAKHDAYDEDARV | 701 | CACGAGAAGTACgCcAAGCACGACgccTACGACGAAGATgc | 702 |
| | | | cCGGgtg | |
| M7-Y55A | HEKASKHDWYDEDTRA | 703 | CACGAGAAGgccAGCAAGCACGACTGGTACGACGAAGATAC | 704 |
| | | | CCGGGCC | |
| M7-Y61A | HEKYSKHDWADEDTRA | 705 | CACGAGAAGTACAGCAAGCACGACTGGgccGACGAAGATAC | 706 |
| | | | CCGGGCC | |
| M8 | LIKCSTQAANAKAEAL | 707 | CTGATCAAGTGCAGCACCCAGGCCGCCAACGCCAAGGCTGA | 708 |
| | | | AGCCCTG | |
| M8V1 | LIACATQAANAAAAAL | 709 | CTGATCgccTGCgccACCCAGGCCGCCAACGCCgccGCTgc | 710 |
| | | | cGCCCTG | |
| M8V2 | LIKASAAAAAAKAEAL | 711 | CTGATCAAGgccAGCgccgccGCCGCCgccGCCAAGGCTGA | 712 |
| | | | AGCCCTG | |
| M8V3 | AAKCSTQVANAKAEAA | 713 | gccgccAAGTGCAGCACCCAGgtgGCCAACGCCAAGGCTGA | 714 |
| | | | AGCCgcc | |
| M8V4 | LIKCSTQAVNVKVEVL | 715 | CTGATCAAGTGCAGCACCCAGGCCgtgAACgtgAAGgtgGA | 716 |
| | | | AgtgCTG | |
| M9 | YRHSPGCLTFTAEDEL | 717 | TACCGGCATAGCCCTGGCTGCCTGACCTTCACCGCCGAGGA | 718 |
| | | | CGAACTG | |
| M9V1 | YAASPGCLTFTAAAAL | 719 | TACgccgccAGCCCTGGCTGCCTGACCTTCACCGCCgccgc | 720 |
| | | | cgccCTG | |
| M9V2 | YRHAPGALAAAAEDEL | 721 | TACCGGCATgccCCTGGCgccCTGgccgccgccGCCGAGGA | 722 |
| | | | CGAACTG | |
| M9V3 | YRHSAACATFTVEDEA | 723 | TACCGGCATAGCgccgccTGCgccACCTTCACCgtgGAGGA | 724 |
| | | | CGAAgcc | |
| M9-Y90A | ARHSPGCLTFTAEDEL | 725 | gccCGGCATAGCCCTGGCTGCCTGACCTTCACCGCCGAGGA | 726 |
| | | | CGAACTG | |
| M10 | ETEVIIEFPSLFEGDR | 727 | GAGACAGAGGTGATCATCGAGTTTCCCAGCCTGTTCGAGGG | 728 |
| | | | CGACCGG | |
| M10V1 | ATAVIIEFPSLFEGAA | 729 | gccACAgccGTGATCATCGAGTTTCCCAGCCTGTTCGAGGG | 730 |
| | | | Cgccgcc | |
| M10V2 | EAEVIIAFPALFAGDR | 731 | GAGgccGAGGTGATCATCgccTTTCCCgccCTGTTCgccGG | 732 |
| | | | CGACCGG | |
| M10V3 | ETEVIIEAASLAEADR | 733 | GAGACAGAGGTGATCATCGAGgccgccAGCCTGgccGAGgc | 734 |
| | | | cGACCGG | |
| M10V4 | ETEAAAEFPSAFEGDR | 735 | GAGACAGAGgccgccgccGAGTTTCCCAGCgccTTCGAGGG | 736 |
| | | | CGACCGG | |
| M11 | ITTAGVVFFVSFFVER | 737 | ATCACCACCGCCGGCGTGGTGTTTTTCGTGAGCTTTTTCGT | 738 |
| | | | GGAAAGA | |
| M11V1 | IATAGVVFFVAFFVAA | 739 | ATCgccACCGCCGGCGTGGTGTTTTTCGTGgccTTTTTCGT | 740 |
| | | | Ggccgcc | |
| M11V2 | ITAAGVVAAVSAFVER | 741 | ATCACCgccGCCGGCGTGGTGgccgccGTGAGCgccTTCGT | 742 |
| | | | GGAAAGA | |
| M11V3 | ITTAAAAFFVSFAVER | 743 | ATCACCACCGCCgccgccgccTTTTTCGTGAGCTTTgccGT | 744 |
| | | | GGAAAGA | |
| M11V4 | ATTVGVVFFASFFAER | 745 | gccACCACCgtgGGCGTGGTGTTTTTCgccAGCTTTTTCgc | 746 |
| | | | cGAAAGA | |
| M12 | RVLDRLYGAVSGLKKN | 24 | AGAGTGCTGGATCGGCTGTATGGAGCCGTGTCCGGCCTGAA | 26 |
| | | | GAAGAAT | |
| M12V1 | AVLAALYGAVSGLAAN | 747 | gccGTGCTGgccgccCTGTATGGAGCCGTGTCCGGCCTGgc | 748 |
| | | | cgccAAT | |
| M12V2 | RALDRLYAAVAALKKA | 749 | AGAgccCTGGATCGGCTGTATgccGCCGTGgccgccCTGAA | 750 |
| | | | GAAGgcc | |
| M12V3 | RVADRAYGVASGAKKN | 751 | AGAGTGgccGATCGGgccTATGGAgtggccTCCGGCgccAA | 752 |
| | | | GAAGAAT | |
| M12-Y162A | RVLDRLAGAVSGLKKN | 753 | AGAGTGCTGGATCGGCTGgccGGAGCCGTGTCCGGCCTGAA | 754 |
| | | | GAAGAAT | |
| M13 | EGQYKLTRKALSMYCL | 755 | GAGGGACAGTACAAGCTGACCCGGAAGGCCCTGAGCATGTA | 756 |
| | | | CTGCCTG | |
| M13V1 | AGQYALTAAALAMYCL | 757 | gccGGACAGTACgccCTGACCgccgccGCCCTGgccATGTA | 758 |
| | | | CTGCCTG | |
| M13V2 | EAAYKLARKALSAYAL | 759 | GAGgccgccTACAAGCTGgccCGGAAGGCCCTGAGCgccTA | 760 |
| | | | CgccCTG | |
| M13V3 | EGQYKATRKVASMYCA | 761 | GAGGGACAGTACAAGgccACCCGGAAGgtggccAGCATGTA | 762 |
| | | | CTGCgcc | |
| M13-Y175A | EGQAKLTRKALSMYCL | 763 | GAGGGACAGgccAAGCTGACCCGGAAGGCCCTGAGCATGTA | 764 |
| | | | CTGCCTG | |
| M13-Y185A | EGQYKLTRKALSMACL | 765 | GAGGGACAGTACAAGCTGACCCGGAAGGCCCTGAGCATGgc | 766 |
| | | | cTGCCTG | |
| Ml4 | DKKRANDNEGTNPKRH | 767 | GATAAGAAGAGAGCTAACGACAATGAGGGCACAAATCCCAA | 768 |
| | | | GCGGCAC | |
| M14V1 | DAARANDNEATNPARH | 769 | GATgccgccAGAGCTAACGACAATGAGgccACAAATCCCgc | 770 |
| | | | cCGGCAC | |
| M14V2 | AKKRAAANEGANPKRH | 771 | gccAAGAAGAGAGCTgccgccAATGAGGGCgccAATCCCAA | 772 |
| | | | GCGGCAC | |
| M14V3 | DKKRANDAAGTAPKRA | 773 | GATAAGAAGAGAGCTAACGACgccgccGGCACAgccCCCAA | 774 |
| | | | GCGGgcc | |
| M14V4 | DKKAVNDNEGTNAKAH | 775 | GATAAGAAGgccgtgAACGACAATGAGGGCACAAATgccAA | 776 |
| | | | GgccCAC | |
| M15 | KSIVFSVSDYGKLYVL | 777 | AAGAGCATCGTGTTCTCCGTGTCTGACTACGGCAAGCTGTA | 778 |
| | | | CGTGCTG | |
| M15V1 | AAIVFAVADYGALYVL | 779 | gccgccATCGTGTTCgccGTGgccGACTACGGCgccCTGTA | 780 |
| | | | CGTGCTG | |
| M15V2 | KSIAFSASAYAKLYAL | 781 | AAGAGCATCgccTTCTCCgccTCTgccTACgccAAGCTGTA | 782 |
| | | | CgccCTG | |
| M15V3 | KSAVASVSDYGKAYVA | 783 | AAGAGCgccGTGgccTCCGTGTCTGACTACGGCAAGgccTA | 784 |
| | | | CGTGgcc | |
| M15-Y643A | KSIVFSVSDAGKLYVL | 785 | AAGAGCATCGTGTTCTCCGTGTCTGACgccGGCAAGCTGTA | 786 |
| | | | CGTGCTG | |
| M15-Y647A | KSIVFSVSDYGKLAVL | 787 | AAGAGCATCGTGTTCTCCGTGTCTGACTACGGCAAGCTGgc | 788 |
| | | | CGTGCTG | |
| Ml6 | DDAEFLGRICEYFMPH | 789 | GACGATGCCGAATTCCTGGGCCGGATCTGCGAATACTTCAT | 790 |
| | | | GCCCCAC | |
| M16V1 | AAAEFAARIAEYFMPH | 791 | gccgccGCCGAATTCgccgccCGGATCgccGAATACTTCAT | 792 |
| | | | GCCCCAC | |
| M16V2 | DDAEALGRACEYAAPA | 793 | GACGATGCCGAAgccCTGGGCCGGgccTGCGAATACgccgc | 794 |
| | | | cCCCgcc | |
| M16V3 | DDVAFLGAICAYFMAH | 795 | GACGATgtggccTTCCTGGGCgccATCTGCgccTACTTCAT | 796 |
| | | | GgccCAC | |
| M16-Y661A | DDAEFLGRICEAFMPH | 797 | GACGATGCCGAATTCCTGGGCCGGATCTGCGAAgccTTCAT | 798 |
| | | | GCCCCAC | |
| Ml7 | EKGKIRYHTVYEKGFR | 28 | GAAAAGGGCAAGATCCGGTACCACACAGTGTACGAAAAGGG | 30 |
| | | | CTTTAGA | |
| M17V1 | EAAAIRYHTVYEAAFR | 799 | GAAgccgccgccATCCGGTACCACACAGTGTACGAAgccgc | 800 |
| | | | CTTTAGA | |
| M17V2 | EKGKARYAAAYEKGAR | 801 | GAAAAGGGCAAGgccCGGTACgccgccgccTACGAAAAGGG | 802 |
| | | | CgccAGA | |
| M17V3 | AKGKIAYHTVYAKGFA | 803 | gccAAGGGCAAGATCgccTACCACACAGTGTACgccAAGGG | 804 |
| | | | CTTTgcc | |
| Ml8 | AYNDLQKKCVEAVLAF | 805 | GCATACAACGACCTGCAGAAGAAGTGCGTGGAGGCCGTGCT | 806 |
| | | | GGCTTTC | |
| M18V1 | AYAALQAACAEAVLAF | 807 | GCATACgccgccCTGCAGgccgccTGCgccGAGGCCGTGCT | 808 |
| | | | GGCTTTC | |
| M18V2 | AYNDAAKKAVEAAAAF | 809 | GCATACAACGACgccgccAAGAAGgccGTGGAGGCCgccgc | 810 |
| | | | cGCTTTC | |
| M18V3 | VYNDLQKKCVAVVLVA | 811 | gtgTACAACGACCTGCAGAAGAAGTGCGTGgccgtgGTGCT | 812 |
| | | | Ggtggcc | |
| M18-Y683A | AANDLQKKCVEAVLAF | 813 | GCAgccAACGACCTGCAGAAGAAGTGCGTGGAGGCCGTGCT | 814 |
| | | | GGCTTTC | |
| Ml9 | GARYIDFREILAQTMC | 32 | GGCGCCCACTACATCGACTTCCGGGAGATCCTGGCCCAGAC | 34 |
| | | | CATGTGC | |
| M19-C727A | GARYIDFREILAQTMA | 815 | GGCGCCCACTACATCGACTTCCGGGAGATCCTGGCCCAGAC | 816 |
| | | | CATGgcC | |
| M19V1 | AARYIAFREIAAAAMC | 817 | gccGCCCACTACATCgccTTCCGGGAGATCgccGCCgccgc | 818 |
| | | | cATGTGC | |
| M19V2 | GAAYADFREALAQTAA | 819 | GGCGCCgccTACgccGACTTCCGGGAGgccCTGGCCCAGAC | 820 |
| | | | Cgccgcc | |
| M19V3 | GVHYIDAAAILVQTMC | 821 | GGCgtgCACTACATCGACgccgccgccATCCTGgtgCAGAC | 822 |
| | | | CATGTGC | |
| M19-G712A | AARYIDFREILAQTMC | 823 | GcCGCCCACTACATCGACTTCCGGGAGATCCTGGCCCAGAC | 824 |
| | | | CATGTGC | |
| M19-IA | GAHYADFREALAQTMC | 825 | GGCGCCCACTACgcCGACTTCCGGGAGgcCCTGGCCCAGAC | 826 |
| | | | CATGTGC | |
| M19-T725A | GAHYIDFREILAQAMC | 827 | GGCGCCCACTACATCGACTTCCGGGAGATCCTGGCCCAGgC | 828 |
| | | | CATGTGC | |
| M20 | KEAEKTAVNKVRRAFF | 829 | AAGGAGGCCGAAAAGACCGCAGTGAACAAGGTGAGACGCGC | 830 |
| | | | CTTCTTC | |
| M20V1 | AEAEAAAVNAVRRAFF | 831 | gccGAGGCCGAAgccgccGCAGTGAACgccGTGAGACGCGC | 832 |
| | | | CTTCTTC | |
| M20V2 | KEAEKTAAAKARRAAA | 833 | AAGGAGGCCGAAAAGACCGCAgccgccAAGgccAGACGCGC | 834 |
| | | | Cgccgcc | |
| M20V3 | KAVAKTVVNKVRRVFF | 835 | AAGgccgtggccAAGACCgtgGTGAACAAGGTGAGACGCgt | 836 |
| | | | gTTCTTC | |
| M20V4 | KEAEKTAVNKVAAAFF | 837 | AAGGAGGCCGAAAAGACCGCAGTGAACAAGGTGgccgccGC | 838 |
| | | | CTTCTTC | |
| M21 | HHLKFVIDEFGLFSD | 839 | CACCACCTGAAGTTCGTGATTGACGAGTTCGGCCTGTTCAG | 840 |
| | | | CGAC | |
| M21V1 | HHLAFVIAEFALFAA | 841 | CACCACCTGgccTTCGTGATTgccGAGTTCgccCTGTTCgc | 842 |
| | | | cgcc | |
| M21-HH | AALKFVIDEFGLFSD | 843 | gccgccCTGAAGTTCGTGATTGACGAGTTCGGCCTGTTCAG | 844 |
| | | | CGAC | |
| M21V2 | HHAKFAIDEFGAFSD | 845 | CACCACgccAAGTTCgccATTGACGAGTTCGGCgccTTCAG | 846 |
| | | | CGAC | |
| M21V3 | HHLKAVADAAGLASD | 847 | CACCACCTGAAGgccGTGgccGACgccgccGGCCTGgccAG | 848 |
| | | | CGAC | |

[0529] Using the EGFP-mCherry dual-fluorescence reporter system of the invention, these Cas13e mutants were functionally screened to assess their collateral vs. gRNA-guided cleavage activities. Specifically, according to standard cell culture methods, human HEK293 cells were grown in 24-well tissue culture plates to a suitable density before the cells were transfected with PEI reagents and plasmids that express each mutant Cas13e and the reporter system fluorescent proteins. Transfected cells were cultured at 37° C. in incubator under 5% CO₂ for about 48 hours, before measuring EGFP and mCherry signals in the cells with FACS. Mutants leading to low percentage of the gRNA-targeted EGFP signal (lower percentage of EGFP⁺ cells, as a readout for preserved gRNA-guided cleavage) and high percentage of non-targeted mCherry signal (higher percentage of mCherry⁺ cells, as a readout for lacking collateral effect) were selected.

[0530] In this experiment, dCas13e with no gRNA-guided cleavage was used as a negative control, and the results (mean±s.e.m.) were normalized against that of dCas13e and listed below. Cas13e mutants located at the upper left area of FIG. 19C had low collateral effect (high mCherry signal) and high gRNA-guided cleavage activity (low EGFP signal), and were selected as the desired low/no collateral effect mutants.

| Variants | % mCherry | S.E.M. | % EGFP | S.E.M. |
|---|---|---|---|---|
| dead | 1.0000 | 0.0172 | 1.0000 | 0.0191 |
| M1V1 | 0.7065 | 0.0068 | 0.1287 | 0.0048 |
| M1V2 | 0.4777 | 0.0143 | 0.0494 | 0.0072 |
| M1V3 | 0.6128 | 0.0217 | 0.1008 | 0.0087 |
| M1V4 | 0.9068 | 0.0114 | 0.1691 | 0.0086 |
| M1-Y113A | 0.5756 | 0.0173 | 0.0731 | 0.0062 |
| M2V1 | 0.5513 | 0.0135 | 0.0958 | 0.0050 |
| M2V2 | 1.1267 | 0.0068 | 0.0538 | 0.0010 |
| M2V3 | 0.8590 | 0.0138 | 0.0392 | 0.0025 |
| M2V4 | 0.8128 | 0.0177 | 0.0353 | 0.0006 |
| M3V1 | 0.4836 | 0.0050 | 0.0797 | 0.0056 |
| M3V2 | 0.7229 | 0.0072 | 0.0296 | 0.0023 |
| M3V3 | 0.5786 | 0.0021 | 0.0470 | 0.0035 |
| M3-Y764A | 0.6513 | 0.0114 | 0.0621 | 0.0021 |
| M4V1 | 0.4097 | 0.0131 | 0.3639 | 0.0191 |
| M4V2 | 0.3381 | 0.0185 | 0.1957 | 0.0125 |
| M4V3 | 0.3477 | 0.0061 | 0.2303 | 0.0077 |
| M4V4 | 0.2991 | 0.0131 | 0.1811 | 0.0101 |
| M5V1 | 0.9851 | 0.0023 | 0.0651 | 0.0012 |
| M5V2 | 0.5929 | 0.0161 | 0.0945 | 0.0071 |
| M5V3 | 0.4970 | 0.0269 | 0.0652 | 0.0077 |
| M5-Y19A | 0.5905 | 0.0247 | 0.0716 | 0.0034 |
| M6V1 | 0.5429 | 0.0243 | 0.0468 | 0.0023 |
| M6V2 | 0.8598 | 0.0194 | 0.0769 | 0.0073 |
| M6V3 | 0.9830 | 0.0055 | 0.0745 | 0.0049 |
| M6V4 | 1.1557 | 0.0131 | 0.0948 | 0.0077 |
| M7V1 | 1.2271 | 0.0061 | 0.0831 | 0.0038 |
| M7V2 | 0.7685 | 0.0201 | 0.0953 | 0.0054 |
| M7V3 | 1.0223 | 0.0279 | 0.0652 | 0.0028 |
| M7-Y55A | 0.7612 | 0.0293 | 0.0555 | 0.0015 |
| M7-Y61A | 0.9764 | 0.0268 | 0.0462 | 0.0045 |
| M8V1 | 0.3752 | 0.0237 | 0.3023 | 0.0185 |
| M8V2 | 0.3283 | 0.0129 | 0.2269 | 0.0118 |
| M8V3 | 0.3884 | 0.0040 | 0.4274 | 0.0041 |
| M8V4 | 0.7660 | 0.0164 | 0.4349 | 0.0279 |
| M9V1 | 1.0102 | 0.0091 | 0.3195 | 0.0045 |
| M9V2 | 0.3600 | 0.0097 | 0.3392 | 0.0210 |
| M9V3 | 0.2929 | 0.0199 | 0.2937 | 0.0220 |
| M9-Y90A | 0.5326 | 0.0092 | 0.3697 | 0.0075 |
| M10V1 | 0.3257 | 0.0184 | 0.2441 | 0.0093 |
| M10V2 | 0.3163 | 0.0089 | 0.2009 | 0.0125 |
| M10V3 | 0.9338 | 0.0095 | 1.4478 | 0.0212 |
| M10V4 | 0.7100 | 0.0126 | 0.3503 | 0.0175 |
| M11V1 | 0.8652 | 0.0040 | 0.2489 | 0.0073 |
| M11V2 | 0.9422 | 0.0200 | 0.4735 | 0.0159 |
| M11V3 | 0.9719 | 0.0059 | 0.7834 | 0.0087 |
| M11V4 | 0.4334 | 0.0156 | 0.0917 | 0.0088 |
| M12V1 | 0.5396 | 0.0160 | 0.4120 | 0.0076 |
| M12V2 | 0.3679 | 0.0114 | 0.3515 | 0.0160 |
| M12V3 | 1.0612 | 0.0218 | 0.0995 | 0.0064 |
| M12-Y162A | 0.4723 | 0.0138 | 0.0456 | 0.0033 |
| M13V1 | 1.0170 | 0.0187 | 0.3899 | 0.0246 |
| M13V2 | 0.9923 | 0.0137 | 0.3386 | 0.0124 |
| M13V3 | 0.9856 | 0.0112 | 0.4375 | 0.0112 |
| M13-Y175A | 0.5394 | 0.0126 | 0.3047 | 0.0122 |
| M13-Y185A | 0.4872 | 0.0144 | 0.2900 | 0.0106 |
| M14V1 | 0.3943 | 0.0053 | 0.0675 | 0.0026 |
| M14V2 | 0.3764 | 0.0022 | 0.0441 | 0.0010 |
| M14V3 | 0.4114 | 0.0187 | 0.0484 | 0.0030 |
| M14V4 | 0.4663 | 0.0190 | 0.0734 | 0.0006 |
| M15V1 | 0.8199 | 0.0384 | 0.0700 | 0.0026 |
| M15V2 | 0.8321 | 0.0204 | 0.1070 | 0.0039 |
| M15V3 | 1.0033 | 0.0118 | 0.3904 | 0.0055 |
| M15-Y643A | 0.9455 | 0.0359 | 0.1877 | 0.0106 |
| M15-Y647A | 0.8508 | 0.0023 | 0.0762 | 0.0023 |
| M16V1 | 0.8311 | 0.0185 | 0.1553 | 0.0029 |
| M16V2 | 0.9423 | 0.0194 | 0.1837 | 0.0046 |
| M16V3 | 0.3773 | 0.0054 | 0.0456 | 0.0026 |
| M16-Y661A | 0.4237 | 0.0193 | 0.0509 | 0.0043 |
| M17V1 | 0.4721 | 0.0165 | 0.0706 | 0.0013 |
| M17V2 | 0.9337 | 0.0121 | 0.1091 | 0.0055 |
| M17V3 | 0.5244 | 0.0312 | 0.0451 | 0.0036 |
| M18V1 | 0.2546 | 0.0060 | 0.0519 | 0.0017 |
| M18V2 | 0.8277 | 0.0224 | 0.1730 | 0.0006 |
| M18V3 | 0.8065 | 0.0300 | 0.2114 | 0.0069 |
| M18-Y683A | 0.4352 | 0.0193 | 0.0710 | 0.0050 |
| M19-C727A | 0.3308 | 0.0157 | 0.0280 | 0.0031 |
| M19V1 | 0.4785 | 0.0143 | 0.0604 | 0.0007 |
| M19V2 | 0.8989 | 0.0153 | 0.0408 | 0.0026 |
| M19V3 | 0.8012 | 0.0161 | 0.0679 | 0.0020 |
| M19-G712A | 0.3631 | 0.0131 | 0.0331 | 0.0020 |
| M19-IA | 0.7763 | 0.0052 | 0.0260 | 0.0025 |
| M19-T725A | 0.3600 | 0.0150 | 0.0353 | 0.0030 |
| M20V1 | 0.5719 | 0.0112 | 0.0812 | 0.0012 |
| M20V2 | 0.8873 | 0.0220 | 0.4079 | 0.0083 |
| M20V3 | 0.6858 | 0.0261 | 0.0598 | 0.0021 |
| M20V4 | 0.6208 | 0.0361 | 0.4449 | 0.0331 |
| M21-HH | 0.6930 | 0.0223 | 0.0489 | 0.0040 |
| M21V1 | 0.4833 | 0.0154 | 0.0608 | 0.0025 |
| M21V2 | 0.3888 | 0.0090 | 0.0632 | 0.0068 |
| M21V3 | 0.6676 | 0.0332 | 0.0785 | 0.0024 |
| M17YY | 1.0497 | 0.0035 | 0.2705 | 0.0211 |
| WT | 0.5065 | 0.0086 | 0.0552 | 0.0013 |

[0531] After screening from the mutagenesis library and further different combinations with single, double, triple or quadruple mutations, many mutants with reduced/eliminated collateral effect were identified. For example, Cas13e-M17YY (carrying Y672A, Y676A) exhibited similarly high level of EGFP knockdown and lower mCherry knockdown, compared with wild-type Cas13e (FIGS. 19C and 19D). Furthermore, with different EGFP gRNAs, or in vitro cleavage activities, similar results were observed for Cas13e-M17YY, named as cfCas13e (collateral free Cas13e), which showed effective on-target cleavage activities and considerably reduced collateral effects (FIGS. 19E-19G).

[0532] Overall, these mutants exhibited less than 25% collateral effect (e.g., ≥75% mCherry⁺ cells), and ≥75% gRNA-guided cleavage (≤25% EGFP⁺ cells). They include: M1V4, M2V2, M2V3, M2V4, M5V1, M6V2, M6V3, M6V4, M7V1, M7V2, M7V3, M7-Y55A, M7-Y61A, M11V1, M12V3, M15V1, M15V2, M15-Y643A, M15-Y647A, M16V1, M16V2, M17V2, M18V2, M18V3, M19V2, M19V3, M19-IA, etc. (see above table and FIG. 19C).

[0533] Further, some of the Cas13e mutants exhibited low collateral effect (e.g., ≤25% collateral effect, or ≥75% mCherry⁺ cells), and intermediate gRNA-guided cleavage (e.g., 25%≤EGFP⁺ cells≤75%), including: M17YY, M8V4, M9V1, M11V2, M11V3, M13V1, M13V2, M13V3, M15V3, M20V2, etc. (see above table and FIG. 19C). The gRNA-guided cleavage efficiency for these mutants can be enhanced further by, for example, using multiple gRNA targeting different sites of the target sequence, and the collateral effect would remain low.

[0534] In other words, the invention has provided mutants having substantially retained (e.g., retaining at least about 50%, 60%, 70%, 80%, 85%, 90%, 95%, 96%, 97%, 98%, or 99%) wild-type level gRNA-guided cleavage, while substantially reducing/eliminating (at least about 75%, 80%, 85%, 90%, 95%, 96%, 97%, 98%, 99%, or 100%) collateral effect.

[0535] While not wishing to be bound by any particular theory, the data presented herein seems to suggest the following mechanism for reduced/eliminated collateral effect, partly based on the analysis of the locations of the effective mutants in the 3D structure of the Cas13 effector enzyme based on PyMOL visualization. Specifically, it was found that most mutants with the desired effects (e.g., reduced/eliminated collateral effect) have mutations within the HEPN1/HEPN2 domains, usually near the RXXXXH catalytic active site. It is believed that residues in these regions may have participated in binding between Cas13e to the target RNA and/or the non-specific RNA, and mutations in these residues had different/differential effects on Cas13e affinity towards different RNA targets, hence the cleavage efficiency towards these RNA targets.

[0536] The identified desired Cas13e mutants with reduced/eliminated collateral effects seem to share the following characteristics:

[0537] 1. mutations are located within the HEPN1 domain and the inter-domain linker (IDL) region (e.g., residues 1-194 in Cas13e), and the HEPN2 domain (e.g., residues 620-775 in Cas13e).

[0538] 2. in Cas13e, mutations are located within 125 residues of the RXXXXH motif.

[0539] 3. most mutations, in 3D structure, are in the vicinity of the catalytic activity site formed by the RXXXXH motifs of HEPN1 and HEPN2 domains.

[0540] 4. for each mutated residue, substitutions by residues other than Ala (especially Val, Gly, and Ile), are similarly effective to reduce/eliminate collateral effect. These mutations are expressly contemplated and disclosed herein, and are within the scope of the invention.

[0541] Certain specific positions of the desired mutants in Cas13e are listed below:

| Variants | Mutations | Amino Acids | SEQ ID NO: |
|---|---|---|---|
| M1 | | RTIMERAYERAIFECRRR | 637 |
| M1V4 | I108A, A112V, A116V, I117A | RTAMERVYERVAFECRRR | 645 |
| M2 | | AFEEKVVKAKKMSEKE | 649 |
| M2V2 | E698A, E699A, E709A, K710A | AFAAKVVKAKKMSAAE | 653 |
| M2V3 | F697A, M709A, S708A, E711A | AAEEKVVKAKKAAEKA | 655 |
| M2V4 | A696V, V701A, V702A, A704V | VFEEKAAKVKKMSEKE | 657 |
| M15 | | KSIVFSVSDYGKLYVL | 777 |
| M5V1 | R23A, K24A, T28A, N32A, K33A | YQGAAAWCFAIAFAAA | 681 |
| M6 | | LVNRDKNDGLFVESLLR | 16 |
| M6V2 | N37A, N41A, E47A, S48A | LVARDKADGLFVAALLR | 691 |
| M6V3 | V36A, G43A, F45A, V46A | LANRDKNDALAAESLLR | 693 |
| M6V4 | L35A, L44A, L49A, L50A | AVNRDKNDGAFVESAAR | 695 |
| M7 | | HEKYSKHDWYDEDTRA | 20 |
| M7V1 | H52A, K54A, K57A, H58A, R66A | AEAYSAADWYDEDTAA | 697 |
| M7V2 | E53A, D59A, D62A, E63A, D64A | HAKYSKHAWYAAATRA | 699 |
| M7V3 | S56A, W60A, T65A, A67V | HEKYAKHDAYDEDARV | 701 |
| M7-Y55A | Y55A | HEKASKHDWYDEDTRA | 703 |
| M7-Y61A | Y61A | HEKYSKHDWADEDTRA | 705 |
| M8 | | LIKCSTQAANAKAEAL | 707 |
| M8V4 | A76V, A78V, A80V, A82V | LIKCSTQAVNVKVEVL | 715 |
| M9 | | YRHSPGCLTFTAEDEL | 717 |
| M9V1 | R91A, H92A, E102A, D103A, E104A | YAASPGCLTFTAAAAL | 719 |
| M11 | | ITTAGVVFFVSFFVER | 737 |
| M11V1 | T141A, S150A, E154A, R155A | IATAGVVFFVAFFVAA | 739 |
| M11V2 | T142A, F147A, F148A, F151A | ITAAGWAAVSAFVER | 741 |
| M11V3 | G144A, VI45A, V146A, F152A | ITTAAAAFFVSFAVER | 743 |
| M12 | | RVLDRLYGAVSGLKKN | 24 |
| M12V3 | L158A, L161A, A164V, V165A, L168A | RVADRAYGVASGAKKN | 751 |
| M13 | | EGQYKLTRKALSMYCL | 755 |
| M13V1 | E172A, K176A, RI79A, K180A, S183A | AGQYALTAAALAMYCL | 757 |
| M13V2 | G173A, Q174A, T178A, M184A, C186A | EAAYKLARKALSAYAL | 759 |
| M13V3 | L177A, A181V, L182A, L187A | EGQYKATRKVASMYCA | 761 |
| M15 | | KSIVFSVSDYGKLYVL | 777 |
| M15V1 | K634A, S635A, S639A, S641A, K645A | AAIVFAVADYGALYVL | 779 |
| M15V2 | V637A, V640A, D642A, G644A, V648A | KSIAFSASAYAKLYAL | 781 |
| M15V3 | I636A, F638A, L646A, L649A | KSAVASVSDYGKAYVA | 783 |
| M15-Y643A | Y643A | KSIVFSVSDAGKLYVL | 785 |
| M15-Y647A | Y647A | KSIVFSVSDYGKLAVL | 787 |
| M16 | | DDAEFLGRICEYFMPH | 789 |
| M16V1 | D650A, D651A, L655A, G656A, C659A | AAAEFAARIAEYFMPH | 791 |
| M16V2 | F654A, I658A, F662A, M663A, H665A | DDAEALGRACEYAAPA | 793 |
| M17 | | EKGKIRYHTVYEKGFR | 28 |
| M17V2 | I670A, H673A, T674A, V675A, F680A | EKGKARYAAAYEKGAR | 801 |
| M17YY | Y672A, Y676A | EKGKIRAHTVAEKGFR | 849 |
| M18 | | AYNDLQKKCVEAVLAF | 805 |
| M18V2 | L686A, Q687A, C690A, V694A, L695A | AYNDAAKKAVEAAAAF | 809 |
| M18V3 | A682V, E692A, A693V, A696V, F697A | VYNDLQKKCVAVVLVA | 811 |
| M19 | | GAHYIDFREILAQTMC | 32 |
| M19V2 | H714A, I716A, I721A, M726A, C727A | GAAYADFREALAQTAA | 819 |
| M19V3 | A713V, F718A, R719A, E720A, A723V | GVHYIDAAAILVQTMC | 821 |
| M19-IA | I716A, I721A | GAHYADFREALAQTMC | 825 |
| M20 | | KEAEKTAVNKVRRAFF | 829 |
| M20V2 | V735A, N736A, V738A, F742A, F743A | KEAEKTAAAKARRAAA | 833 |

[0542] One specific mutant, M17YY, to a large extent has reduced collateral effect compared to the previously identified M17.15-1 and M17.15-2 mutants (Y672A,Y676A) (see FIGS. 13-14). M17YY is sometimes referred to as cfCas13e (collateral free Cas13e) herein for further functional characterization.

[0543] On the other hand, the above screening also produced multiple mutants with significantly enhanced collateral effect, based on ≥60% collateral cleavage efficiency (e.g., ≤40% mCherry⁺ cells) and better gRNA-guided cleavage compared to wild-type (e.g., ≤5.5% EGFP⁺ cells). These mutants include: M14V2, M16V3, M18V1, M19-G712A, M19-T725A, M19-C727A, etc. These mutants are mainly located between the two catalytic active sites formed by the RXXXXH motifs. For example, M14V2 is located in the Helical1-1 domain, around the beta-turn towards the two HEPN domains in the 3D structure. Meanwhile, M16V3, M18V1, M19-G712A, M19-T725A, and M19-C727A have mutations in the HEPN2 domain, around/near the alpha-helic and the its flanking unstructured regions, all close to the catalytic active site. The residues involved in these mutants are listed below.

| Variants | Mutations | Amino Acids | SEQ ID NO |
|---|---|---|---|
| M14 | | DKKRANDNEGTNPKRH | 767 |
| M14V2 | D227A, N232A, D233A, T237A | AKKRAAANEGANPKRH | 771 |
| M16 | | DDAEFLGRICEYFMPH | 789 |
| M16V3 | A652V, E653A, R657A, E660A, P664A | DDVAFLGAICAYFMAH | 795 |
| M18 | | AYNDLQKKCVEAVLAF | 805 |
| M18V1 | N684A, D685A, K688A, K689A, V691A | AYAALQAACAEAVLAF | 807 |
| M19 | | GAHYIDFREILAQTMC | 32 |
| M19-G712A | G712A | AAHYIDFREILAQTMC | 823 |
| M19-1725A | T725A | GAHYIDFREILAQAMC | 827 |
| M19-C727A | C727A | GAHYIDFREILAQTMA | 815 |

[0544] It should be understood that, although Ala was used in the mutagenesis studies herein, other substitutions at the same positions (especially those with small (alky) side chains such as Val or Ile, or Gly), also have similar effects as Ala substitution. These mutations are expressly contemplated and disclosed herein, and are within the scope of the invention.

### Example 6 Functional Characterization of cfCas13d in Mammalian Cells

[0545] This experiment, based on using 4 different gRNA (g1-g4) targeting EGFP, demonstrates that cfCas13d has similarly high gRNA-guided target RNA cleavage as the wild-type Cas13d, yet exhibits no significant collateral effect. See FIG. 17F.

gRNA-1, g1:
(SEQ ID NO: 850)
GTCCTCCTTGAAGTCGATGCCCTTCAGCTC
gRNA-2, g2:
(SEQ ID NO: 3)
AGCACTGCACGCCGTAGGTCAGGGTGGTCA
gRNA-3, g3:
(SEQ ID NO: 851)
GCAGGACCATGTGATCGCGCTTCTCGTTGG
gRNA-4, g4:
(SEQ ID NO: 852)
GAACTTCAGGGTCAGCTTGCCGTAGGTGGC

[0546] Purified wild-type Cas13d, cfCas13d, and dCas13d were used to assess in vitro collateral effect as well as gRNA-guided target RNA cleavage. The results showed that cfCas13d did not exhibit any detectable collateral effect (FIG. 17G), while retained relatively high guide RNA directed target RNA cleavage (FIG. 17H).

[0547] The ssRNA target sequence and crRNA for determining gRNA-directed cleavage are:

[0548] ssRNA-cy5-Labeled: 5′-CY5-GGCCAGUGAAUUCGAGCUCGGUACCCGGGGAUCCUCUAGA AAUAUGGAUUACUUGGUAGAACAGCAAUCUACUCGACCUGCAGGCAUGCAAGCUUGGCGU-BHQ2-3′ (SEQ ID NO: 853), and Cas13d-crRNA (SEQ ID NO: 854).

[0549] The ssRNA target sequence and crRNA for determining collateral cleavage are: ssRNA (SEQ ID NO: 853), Cas13d-crRNA (SEQ ID NO: 854), and Collateral RNA-FMA-Labeled:

(SEQ ID NO: 856)
FAM-AAAGAUACGAGGGUGCUAUGUUUCCACGCUCC-BHQ1

### Example 7 Functional Characterization of cfCas13e in Mammalian Cells

[0550] This experiment, based on using 4 different gRNA (g1-g4) targeting EGFP, demonstrates that cfCas13e has similarly high gRNA-guided target RNA cleavage as the wild-type Cas13e, yet exhibits no significant collateral effect. See FIG. 19G.

gRNA-1, g1:
(SEQ ID NO: 3)
AGCACTGCACGCCGTAGGTCAGGGTGGTCA
gRNA-2, g2:
(SEQ ID NO: 850)
GTCCTCCTTGAAGTCGATGCCCTTCAGCTC
gRNA-3, g3:
(SEQ ID NO: 857)
TCGCCGTCCAGCTCGACCAGGATGGGCACC
gRNA-4, g4:
(SEQ ID NO: 858)
TTCGGGCATGGCGGACTTGAAGAAGTCGTG

[0551] Purified wild-type Cas13e, cfCas13e, and dCas13e were used to assess in vitro collateral effect as well as gRNA-guided target RNA cleavage. The results showed that cfCas13e did not exhibit any detectable collateral effect (FIG. 19E), while retained relatively high guide RNA directed target RNA cleavage (FIG. 19F).

[0552] The ssRNA target sequence and crRNA for determining gRNA-directed cleavage are:

[0553] ssRNA-cy5-Labeled: 5′-CY5-GGCCAGUGAAUUCGAGCUCGGUACCCGGGGAUCCUCUAG AAAUAUGGAUUACUUGGUAGAACAGCAAUCUACUCGACCUGCAGGCAUGCAAGCUUGGCGU-BHQ2-3′ (SEQ ID NO: 859), and Cas13e-crRNA (SEQ ID NO: 860).

[0554] The ssRNA target sequence and crRNA for determining collateral cleavage are: ssRNA (SEQ ID NO: 861), Cas13e-crRNA (SEQ ID NO: 862), and collateral RNA-FMA-Labeled:

(SEQ ID NO: 856)
FAM-AAAGAUACGAGGGUGCUAUGUUUCCACGCUCC-BHQ1

### Example 8 Efficacy and Specificity of cfCas13d in Mammalian Cells

[0555] To evaluate whether the expression level of endogenous genes could affect the extend of collateral effects by Cas13d, a panel of 23 endogenous genes with diverse roles and differential expression levels in mammalian cells were selected. For each transcript, 1-6 gRNAs were then designed (FIG. 20A). Selected gRNA sequences for these target genes are listed below.

| | | | SEQ |
|---|---|---|---|
| Gene | gRNA | gRNA sequence | ID NO: |
| ANXA4 | g1 | TTAGGCAGCCCTCATCAGTGCCGGCTCCCT | 863 |
| B4GALNT1 | g1 | CCTCCTGACCAGAAGCTGCCTGAAGGCTCA | 864 |
| CA2 | g1 | AGGACAATCCAGGTCACACATTCCAGAAGA | 865 |
| CKB | 91 | GCAGCCGCTTAAGCACCTCCGAGAACTTCT | 866 |
| EGFR | g1 | GTTTCTGGCAGTTCTCCTCTCCTGCACCCC | 867 |
| EZH2 | g1 | CAAATGCTGGTAACACTGTGGTCCACAAGG | 868 |
| NF2 | g1 | CTTGGCCTGGACGGCGTAAGAAGCCAGGAG | 869 |
| NRAS | g1 | CTGTCTGGTCTTGGCTGAGGTTTCAATGAA | 870 |
| PPARG | g1 | CATTATGAGACATCCCCACTGCAAGGCATT | 871 |
| PPIA | g1 | AAACACCACATGCTTGCCATCCAACCACTC | 872 |
| PPIA | g2 | ATGCCAGGACCCGTATGCTTTAGGATGAAG | 873 |
| RPL4 | g1 | GTTGTGTTCACTCTACGATGCCAACGGCGC | 874 |
| RPL4 | g2 | GAAGTTCAGGAACTTCCTCAATACGATGAC | 875 |
| RPS5 | g1 | ACACATCCACAGCCTGTCGTCTCACAGTCC | 876 |
| SMARCA1 | g1 | CTGGTGAGGATTCCAGTCGCTGTCAAAAAT | 877 |
| STAT3 | g1 | ATCACAATTGGCTCGGCCCCCATTCCCACA | 878 |

[0556] HEK293 cells were transfected with an all-in-one construct containing Cas13d, EGFP, mCherry, non-target (NT) gRNA, or a gRNA targeting each endogenous gene, and another construct containing BFP driven by CAG promoter. BFP was used here for normalizing transfection efficiency. About 48 hours post-transfection, the EGFP and mCherry fluorescence intensity was examined for the collateral effects and target transcript level for RNA knockdown activity (FIG. 20B).

[0557] In general, increased expression level of the endogenous genes were associated with more prominent collateral effects induced by Cas13d (FIGS. 20B-20C). Specifically, obviously reduced dual fluorescence intensity was observed on genes with high expression level (ENO1, RPL4, CKB, BSG, RPS5, and PPIA, CPM>=200; CPM, counts per million), moderate but significant reduction was observed on genes with median expression level (RAF1, STAT3, EZH2, PEBEP1, NRAS, NF2, LENG8 and CA2, 50<CPM<200), and only slight decrease was observed on genes with low expression level (PPIB, ANXA4, NFKB1, SMARCA1, EGFR, PPARG, B4GALNT1, and NEFM, CPM<=50), compared with Cas13d using NT gRNA (FIG. 20B-20C).

[0558] Three individual highly expressed transcripts were selected, with four gRNAs from these endogenous genes for further characterization: RPL4-gRNA1, PPIA-gRNA1, PPIA-gRNA2, and RPS5-gRNA1. It was found that consistent notable reduced fluorescence intensity in Cas13d group but not in cfCas13d group, when compared with dCas13d group (FIGS. 20D-20G).

[0559] Meanwhile, for one medium expressed and one low expressed transcript with target gRNA: CA2-gRNA1 and B4GALNT1-gRNA1, reduced fluorescence intensity was slightly detectable in Cas13d group, but not in cfCas13d group (FIGS. 20J and 20K).

[0560] Consistently, both Cas13d and cfCas13d targeting exhibited robust knockdown of these genes, as confirmed by qPCR analysis (FIG. 20I).

[0561] These results indicate that collateral effects induced by Cas13-mediated knockdown were correlated with gene expression levels, and these collateral effects could be eliminated by cfCas13d.

[0562] To confirm that RNA interference activity by cfCas13d is still broadly applicable, cfCas13d and Cas13d were tested on randomly selected 14 endogenous transcripts in HEK293 cells. It was found that cfCas13d and Cas13d exhibited comparable efficient RNA knockdown activity (82±2% and 93±1%, respectively), indicating that cfCas13d retained high-level activity of RNA interference on most endogenous genes (FIGS. 20H and 20I).

[0563] Taken together, these results indicate that cfCas13d exhibits high RNA interference activity with rare collateral effects, which would maximize its applications.

[0564] On the other hand, multiple low-fidelity Cas13 variants exhibiting increased dual cleavage activity were obtained (bottom left in FIGS. 17D and 19C). These variants of Cas13 are better suited for nucleic acid detection applications such as SHERLOCK.

### Example 9 Elimination of Transcriptome-Wide Collateral Effects in cfCas13d

[0565] To comprehensively detect the collateral effects by Cas13d/cfCas13d-mediated knockdown, transcriptome-wide RNA sequencing (RNA-seq) was performed in Cas13d-, cfCas13d- or dCas13d-treated HEK293 cells.

[0566] Significantly widespread off-target transcriptional changes were identified in cells that expressed Cas13d with RPL4 gRNA3 relative to dCas13d control (2007/6750 significant up/down-regulated genes, respectively), along with significant RPL4 on-target knockdown. Scatter plots of differential transcript levels between Cas13d and dCas13d-mediated RPL4, PPIA, CA2, or PPARG knockdown as determined by RNA sequencing (n=3) were not shown. Among these significant changes, 1 out of 11 predicted RPL4 gRNA-dependent off-target transcripts was identified (RPL4P5, a processed pseudogenes) (FIG. 21A). A similar pattern was observed when targeting RPL4 with a different gRNA (data not shown—Scatter plot of differential transcript levels induced by Cas13d-mediated knockdown with RPL4-g1 or PPIA-g2 as determined by RNA sequencing (n=3), compared with dCas13d).

[0567] Compared with dCas13d control, numerous off-target changes induced by Cas13d were found when targeting PPIA, CA2 or PPARG (FIGS. 21A and 21E).

[0568] Additionally, among those significantly down-regulated changes between Cas13d group and dCas13d group, targeting genes with relatively high expression level (RPL4, PPIA) induced more collateral cleavages than targeting genes with relatively low expression level (CA2, PPARG), and those collateral cleavages induced more RNA transcripts knockdown on high expressed genes than low expressed genes (data not shown—statisticalally reduced counts of down-regulated transcripts induced by Cas13d-mediated RPL4, PPIA knockdown, compared to dCas13d. Reduced counts were correlated to expression level of endogenous transcripts), in agreement with the previous results (FIGS. 20B and 20C).

[0569] Compared with Cas13d, cfCas13d remarkably reduced off-target changes when targeting RPL4 (down-regulated genes, 6750 vs. 39), PPIA (9289 vs. 8), CA2 (3519 vs. 18), and PPARG (1601 vs. 52). In addition, cfCas13d could also target predicted gRNA-dependent off-target sites as Cas13d, indicating mutations in cfCas13d decrease collateral off-target cleavage but not gRNA-dependent off-target cleavage (FIGS. 21A and 21E) (data not shown—Scatter plot of differential transcript levels induced by cfCas13d-mediated knockdown with RPL4-g1 or PPIA-g2 as determined by RNA sequencing (n=3), compared with dCas13d).

[0570] Those results suggest that cfCas13d almost eliminates off-target edits induced by Cas13d collateral activity, and those gRNA-dependent off-target could be eliminated via optimization of the design on gRNAs.

[0571] Further analysis showed that those down-regulated genes induced by CasRx targeting RPL4/PPIA gRNA were mostly distributed in metabolism, biosynthetic process, cell cycle and signal transduction pathways, while cfCasRx exhibited notable decreased off-target changes in these processes (FIGS. 21C and 21D).

[0572] When targeting RPL4, though some genes were similarly down-regulated (e.g., TP53BP2, ZMPSTE24 and FAM157C) or up-regulated (e.g., PPP1R3F), large number of unique genes were only changed in ether RPL4-g1 group or RPL4-g3 group.

[0573] Moreover, no overlaps of down-regulated or up-regulated genes were found between PPIA-g1 group and PPIA-g2 group when targeting PPIA. In addition, most of up-regulated genes from Cas13d targeting RPL4/PPIA were enriched in nucleosome assembly and gene expression pathways, related to cellular stress regulation after cleavage events (data not shown—bulk RNA-seq analysis of genes with differential expression level by Cas13d/cfCas13d targeting RPL4/PPIA, showing clustering analysis of genes with up-regulation induced by Cas13d targeting RPL4/PPIA).

[0574] Those suggested that collateral effects of Cas13d-mediated RNA reduction may inhibit cell growth, consistent with previous reports that massive host transcripts degradation induced by Cas13 result in cell retarded growth and dormancy.

[0575] These findings showed that cfCas13d maintained high specificity of on-target knockdown but collateral effects induced by Cas13d-mediated RNA knockdown were greatly reduced or even completely eliminated.

### Example 10 Elimination of Collateral Effect on Cell Growth

[0576] To further determine the cellular functional impact due to collateral effects induced by Cas13d-mediated RNA knockdown in vivo, stable cell lines were constructed by using the piggyBac transposon system with doxycycline (dox)-inducible Cas13d/cfCas13d/dCas13d expression targeting RPL4 (FIG. 22A).

[0577] Upon dox treatment, it was found that the cell clone carrying Cas13d had a significant retardation on cell growth and a notable decrease of RPL4 transcripts.

[0578] By contrast, the cell clone carrying cfCas13d exhibited no such changes on cell growth, along with a similar significant decrease of RPL4 transcripts (FIG. 22B).

[0579] These findings showed that collateral effects induced by Cas13d-mediated RNA knockdown in HEK293T cells could lead to severe cell growth retardation. Meanwhile, target RNA knockdown with a high-fidelity cfCas13d relieves cell growth stagnation.

### Example 11 Use of cfCas13e for Gene Therapy in Mouse AMD Model

[0580] Age-related macular degeneration (AMD), a progressive condition that is untreatable in up to 90% of patients, is a leading cause of blindness in the elderly worldwide. The two forms of AMD, wet and dry, are classified based on the presence or absence of blood vessels that have disruptively invaded the retina, respectively. Though wet AMD affects only 10-15% of AMD patients, it emerges abruptly, and rapidly progresses to blindness if left untreated. A detailed understanding of the molecular mechanisms underlying wet AMD has led to several robust FDA-approved therapies.

[0581] Wet AMD is typified by choroidal neovascularization (CNV), wherein newly immature blood vessels grow towards the outer retina from the underlying choroid, through a break in the Bruch membrane into the sub-retinal pigment epithelium (sub-RPE) or subretinal space. CNV is a major cause of visual loss.

[0582] Research in the late 1980s and early 1990s revealed the central role of VEGF in vascular biology, which lead to the development of the first FDA-approved anti-VEGF-A treatment for wet AMD—the monoclonal antibody Avastin (bevacizumab by Genentech). Most recently, in 2011, Eylea (VEGF-TRAP-Eye; aflibercept; Regeneron) received FDA approval for treatment of CNV. Aflibercept is a recombinant fusion protein consisting of VEGF-binding portions from the extracellular domains of human VEGF receptors 1 and 2, that are fused to the Fc portion of the human IgG1 immunoglobulin. It binds to circulating VEGFs and acts like a “VEGF trap” to inhibit the activity of VEGF-A and VEGF-B, as well as to placental growth factor (PGF), thus inhibiting the growth of new blood vessels in the choriocapillaris.

[0583] In late 2013, Chengdu Kanghong Pharmaceutical Group gained China Food and Drug Administration (CFDA) approval of Conbercept for the treatment of exudative macular degeneration. Like Conbercept is a recombinant fusion protein composed of the second Ig domain of VEGFR1 and the third and fourth Ig domains of VEGFR2 to the constant region (Fc) of human IgG1.

[0584] This example utilizes a mouse model of wet AMD to show that cfCas13e, just like wild-type Cas13e, can efficiently knock down VEGFA to reduce CNV.

[0585] Two VEGFA-targeting guide RNA molecules, gRNA-1 (g1) and gRNA-2 (g2), were previously identified to be able to direct high efficiency gRNA-guided VEGFA mRNA cleavage and expression knock down in mammalian cells, especially when they are used in combination (g1+g2). The corresponding DNA sequences of the gRNA are: gRNA-1 (g1) (SEQ ID NO: 879) and gRNA-2 (g2) (SEQ ID NO: 880).

[0586] In this experiment, coding sequence for cfCas13e (including two NLS sequences at the N- and C-terminus, under the EFS promoter) and the two gRNA's (g1+g2, under the control of the U6 promoter) were incorporated between the two ITR sequences of an AAV9 viral vector (with AAV9 serotype). Viral particles were injected directly into mouse subretinal space. After 21 days, laser light was used on the eyes of the experimental mouse to imitate UV-induced AMD. Seven days later, the extent of CNV in the experimental animals were determined (see FIGS. 19H and 19I).

[0587] In FIG. 19H, expression of VEGFA target mRNA was normalized against untreated control animals. It is apparent that, when only a non-targeting (NT) guide RNA was provided, cfCase13e did not affect VEGFA expression. In contrast, when both g1 and g2 guide RNA's were provided, cfCas13e efficiently knocked down VEGFA expression to the same extent as the wild-type Cas13e, and to nearly undetectable level (FIG. 19H).

[0588] As another control, certain control animals were also treated, at the time of laser treatment, either Aflibercept or Conbercept (FIG. 19H). The results in FIG. 19I showed that both treatments significantly reduced CNV area compared to PBS control. Notably, all three doses of cfCas13e treatments (5E11, 2E11, and 1E13 vg/kg) significantly reduced CNV (FIG. 19I). Compared to both Aflibercept and Conbercept treatments, the 2E11 dose achieved statisticalally significantly better (lower) CNV area (FIG. 19I).

[0589] In this experiment, the ITR sequence for the AAV9 viral vector is SEQ ID NO: 881, and the nucleotide sequence of the EFS promoter used to drive cfCas13e expression is SEQ ID NO: 882.

[0590] In summary, by combining analysis of 3D structure and protein sequence, Applicant has designed, constructed, and obtained by screening numerous mutant Cas13 variants with reduced or eliminated collateral effect (as well as variants with enhanced collateral effects). The guide RNA-mediated functions of these Cas13e and Cas13d mutants/variants have been verified by in vitro biochemical reactions, endogenous gene expression knock down in mammalian cells, as well as gene therapy in an in vivo mouse model of AMD.

[0591] These results demonstrate that the collateral effects of the Cas13 family proteins, including but not limited to Cas13d and Cas13e, can be engineered according to the methods and examples of the invention by, for example, introducing point mutations in and around the RXXXXH catalytic active sites within the HEPN domains (HEPN1 and HEPN2). These introduced mutations may not affect binding between the respective cfCas13 protein and the cognate gRNA, such that the cfCas13 mutants can still be activated to cleave target RNA in a gRNA-dependent manner. Meanwhile, the cfCas13 mutants have greatly reduced collateral effect compared to the corresponding wild-type Cas13, thus eliminating one significant risk of using Cas13 in gene therapy. A possible (non-limiting) mechanism of how cfCas13 mutants operate is illustrated in FIG. 22C.

Materials and Methods for the examples are provided below.

### Construction of Plasmids.

[0592] The Cas13d (CasRx) gene and gRNA backbone sequences were synthesized by a commercial source. Vectors CAG-Cas13d-p2A-GFP and U6-DR-BpiI-BpiI-DR-EF1α-mCherry were generated to knockdown target genes by transient transfection. The gRNA oligos were annealed and ligated into BpiI sites. The gRNA sequences were listed below.

| gRNA Name | gRNA sequence | SEQ ID NO |
|---|---|---|
| Cas13d mCherry gRNA-g1 | ACTTGATGTTGACGTTGTAGGCGCCGGGCA | 883 |
| Cas13d mCherry gRNA-g2 | CACGTAGGCCTTGGAGCCGTACATGAACTG | 884 |
| Cas13d mCherry gRNA-g3 | GCAGCTTCACCTTGTAGATGAACTCGCCGT | 885 |
| Cas13d non-target gRNA-NT | CGTCTGGCCTTCCTGTAGCCAGCTTTCATC | 886 |
| Cas13a mCherry gRNA-g1 | ACTTGATGTTGACGTTGTAGGCGCCGGGCA | 883 |
| Cas13a mCherry gRNA-g2 | CACGTAGGCCTTGGAGCCGTACATGAACTG | 884 |
| Cas13a mCherry gRNA-g3 | GCAGCTTCACCTTGTAGATGAACTCGCCGT | 885 |
| Cas13a non-target gRNA-NT | CGTCTGGCCTTCCTGTAGCCAGCTTTCATC | 886 |
| Human RPL4 Cas13d gRNA-g1 | GTTGTGTTCACTCTACGATGCCAACGGCGC | 874 |
| Human RPL4 Cas13d gRNA-g2 | CTTTAGACATGACCAGTGCTGGTAGGGCTG | 887 |
| Human RPL4 Cas13d gRNA-g3 | GAAGTTCAGGAACTTCCTCAATACGATGAC | 875 |
| Human RPL4 Cas13d gRNA-g4 | GGTTTCTCATTTTGCCTTTGCCAGCTCTCA | 888 |
| Human PKM Cas13d gRNA-g1 | GGCTCCCTTCTTCAGCTCCACCTCTGCAGT | 889 |
| Human PKM Cas13d gRNA-g2 | GTAGGCGTTATCCAGCGTGATTTTGAGAGT | 890 |
| Human PKM Cas13d gRNA-g3 | GTTCTTGTAGTCCAGCCACAGGATGTTCTC | 891 |
| Human PKM Cas13d gRNA-g4 | GTAGATCTTGCTGCCCACTTCCACCACCTT | 892 |
| Human PFN1 Cas13d gRNA-g1 | GGTCTTTGCCAACCAGGACACCCACCTCAG | 893 |
| Human PFN1 Cas13d gRNA-g2 | GCAGTGAGTCCCGGATCACCGAACATTTCT | 894 |
| Human PFN1 Cas13d gRNA-g3 | GTGCTCTTGGTACGAAGATCCATGCTAAAT | 895 |
| Human PFN1 Cas13d gRNA-g4 | GTCAGTCTTGGTGACAGTGACATTGAAGGT | 896 |
| Cas13d EGFPgRNA-g1 | GTCCTCCTTGAAGTCGATGCCCTTCAGCTC | 850 |
| Cas13d EGFPgRNA-g2 | AGCACTGCACGCCGTAGGTCAGGGTGGTCA | 3 |
| Cas13d EGFPgRNA-g3 | GCAGGACCATGTGATCGCGCTTCTCGTTGG | 851 |
| Cas13d EGFPgRNA-g4 | GAACTTCAGGGTCAGCTTGCCGTAGGTGGC | 852 |
| Human BSG Cas13d gRNA-g1 | ACTCGTAAGTGCCCGTGTCCTCCTCCACGA | 897 |
| Human BSG Cas13d gRNA-g2 | GTCATTCAAGGAGCAGGTGAGGAGTATCTT | 898 |
| Human BSG Cas13d gRNA-g3 | TCTGACGACTTCACAGCCTTCACTCTGGGA | 899 |
| Human BSG Cas13d gRNA-g4 | CTTGTCCTCAGAGTCAGTGATCTTGTACCA | 900 |
| Human BSG Cas13d gRNA-g5 | GTGCAGAGCCGGCGTCGTCATCATCCAGGA | 901 |
| Human CA2 Cas13d gRNA-g1 | AGCACAATCCAGGTCACACATTCCAGAAGA | 865 |
| Human CA2 Cas13d gRNA-g2 | TATGCCAGTGCTCAGGTCCGTTGTGTTTGC | 902 |
| Human CA2 Cas13d gRNA-g3 | CAGGGAAGTTGCTTGATCATAGGAAACAGA | 903 |
| Human CA2 Cas13d gRNA-g4 | AAACTGAATCAATCTGTAAGTGCCATCCAG | 904 |
| Human CA2 Cas13d gRNA-g5 | TTTATCCACAGTATGCTCTGAACCTTGTCC | 905 |
| Human CA2 Cas13d gRNA-g6 | GAATCCAGCACATCAACAACTTTCTGAAGG | 906 |
| Human CA2 Cas13d gRNA-g7 | GCGCCAGTTGTCCACCATCAGTTCTTCGGG | 907 |
| Human CKB Cas13d gRNA-g1 | GCAGCCGCTTAAGCACCTCCGAGAACTTCT | 866 |
| Human CKB Cas13d gRNA-g2 | TGGCCCGGGTTGTCCACGCCTGTCTGGATG | 908 |
| Human CKB Cas13d gRNA-g3 | CGCCCGCCACGCAGCCCACGGTCATGATGT | 909 |
| Human CKB Cas13d gRNA-g4 | CTGCTGCTGCTCCGCCTCCGTCATGCTCTT | 910 |
| Human CKB Cas13d gRNA-g5 | GTCTTATTGTCATTGTGCCAGATACCGCGG | 911 |
| Human ENO1 Cas13d gRNA-g1 | ATATAGCGAGTCTTATCATTGTCCCGGAGC | 912 |
| Human ENO1 Cas13d gRNA-g2 | ATCATCAGTTTGTCAATCTTCTCTTGTTCT | 913 |
| Human ENO1 Cas13d gRNA-g3 | CGCCATTGATGACATTGAACGCCGGGACTG | 914 |
| Human EN01 Cas13d gRNA-g4 | TCTTTCCCATATTTCTCCTTGATGACATTC | 915 |
| Human ENO1 Cas13d gRNA-g5 | CCTTATCAGTGTAGCCAGCTTTCCCAATAG | 916 |
| Human ENO1 Cas13d gRNA-g6 | ACTACCTGGATTCCTGCACTGGCTGTGAAC | 917 |
| Human LENG8 Cas13d gRNA-g1 | CCACCATGCTGTACTGAGAAGACCAATCTG | 918 |
| Human LENG8 Cas13d gRNA-g2 | GCAGGTTCGGTGTAGGTGTGTGGCCCATAG | 919 |
| Human LENG8 Cas13d gRNA-g3 | TGCGGTCCTTGTCCTCCTCCGACTCACAGG | 920 |
| Human LENG8 Cas13d gRNA-g4 | TTGTCCTTCATGAAGACGTTGCGGTTGCCA | 921 |
| Human LENG8 Cas13d gRNA-g5 | CCTCACACTCCAGCGCCGCCATCTTCTTTC | 922 |
| Human LENG8 Cas13d gRNA-g6 | AACGCGTAGTCCTGCTTCTCTTTCCAGTGG | 923 |
| Human NEFM Cas13d gRNA-g1 | GACCACGACTGCGAGCGGAAGCCACTGGAC | 924 |
| Human NEFM Cas13d gRNA-g2 | TTATAGGAGGAGGACACGGTGCTGGGCGAG | 925 |
| Human NEFM Cas13d gRNA-g3 | ATCTCCGCCTCAATCTCCTTATTCTGCTGC | 926 |
| Human NEFM Cas13d gRNA-g4 | CTCCACCTTGACCAGCGACGCCTCCTCGAT | 927 |
| Human NEFM Cas13d gRNA-g5 | CTTGGCGTAGCGGCATTTGAACCACTCTTC | 928 |
| Human NEFM Cas13d gRNA-g6 | TCCTGCAAATGTGCTAAATCTAGTCTCTTC | 929 |
| Human PEBP1 Cas13d gRNA-g1 | TCAGCACTTTGCCCAGCTCGTCCACCGCCG | 930 |
| Human PEBP1 Cas13d gRNA-g2 | TATTCTTAACCTGGGTGGGCGTCAGCACTT | 931 |
| Human PEBP1 Cas13d gRNA-g3 | CTTCCCTGAATCAAGACCATCCCACGAAAT | 932 |
| Human PEBP1 Cas13d gRNA-g4 | ATGCCATTCTCTGTATTTGGGATCCTTCCT | 933 |
| Human PEBP1 Cas13d gRNA-g5 | ATGTTGACCACCAGGAAATGATGCCATTCT | 934 |
| Human PEBP1 Cas13d gRNA-g6 | CCACTGCTGATGTCATTGCCCTTCATGTTG | 935 |
| Human PPIA Cas13d gRNA-g1 | AAACACCACATGCTTGCCATCCAACCACTC | 872 |
| Human PPIA Cas13d gRNA-g2 | ATGCCAGGACCCGTATGCTTTAGGATGAAG | 873 |
| Human PPIA Cas13d gRNA-g3 | CAAACAGCTCAAAGGAGACGCGGCCCAAGG | 936 |
| Human PPIA Cas13d gRNA-g4 | AACCCTTATAACCAAATCCTTTCTCTCCAG | 937 |
| Human PPIA Cas13d gRNA-g5 | CACCCTGACACATAAACCCTGGAATAATTC | 938 |
| Human PPIA Cas13d gRNA-g6 | CCTCCACAATATTCATGCCTTCTTTCACTT | 939 |
| Human RPS5 Cas13d gRNA-g1 | ACACATCCACAGCCTGTCGTCTCACAGTCC | 876 |
| Human RPS5 Cas13d gRNA-g2 | ATACTTCTCCTTCACTGCAATGTAATCCTG | 940 |
| Human RPS5 Cas13d gRNA-g3 | GAGTTAGTGAGGCGCTCCACAATGGGACAC | 941 |
| Human ANXA4 Cas13d gRNA-g1 | TTAGGCAGCCCTCATCAGTGCCGGCTCCCT | 863 |
| Human B4GALNT1 Cas13d gRNA-g1 | CCTCCTGACCAGAAGCTGCCTGAAGGCTCA | 864 |
| Human EGFR Cas13d gRNA-g1 | GTTTCTGGCAGTTCTCCTCTCCTGCACCCC | 867 |
| Human EZH2 Cas13d gRNA-g1 | CAAATGCTGGTAACACTGTGGTCCACAAGG | 868 |
| Human NF2 Cas13d gRNA-g1 | CTTGGCCTGGACGGCGTAAGAAGCCAGGAG | 869 |
| Human NFKB1 Cas13d gRNA-g1 | CTCATAGTTGTCCATAAGTGTTTTGGAAGG | 942 |
| Human NRASCas13d gRNA-g1 | CTGTCTGGTCTTGGCTGAGGTTTCAATGAA | 870 |
| Human PPARG Cas13d gRNA-g1 | CATTATGAGACATCCCCACTGCAAGGCATT | 871 |
| Human PPIB Cas13d gRNA-g1 | GGCCCGTAGTGCTTCAGTTTGAAGTTCTCA | 943 |
| Human RAF1 Cas13d gRNA-g1 | CTCAATCATCCTGCTGTCCACAGGCAGGGT | 944 |
| Human SMARCA1 Cas13d gRNA-g1 | CTGGTGAGGATTCCAGTCGCTGTCAAAAAT | 877 |
| Human STAT3 Cas13d gRNA-g1 | ATCACAATTGGCTCGGCCCCCATTCCCACA | 878 |
| Human RPL4 Cas13d gRNA-g5 | TCAGTCCAAATGCAGAAACGTCCCACATGC | 945 |
| Human RPL4 Cas13d gRNA-g6 | CAATACGATGACCTTTAGACATGACCAGTG | 946 |
| Cas13e EGFPgRNA-g1 | AGCACTGCACGCCGTAGGTCAGGGTGGTCA | 3 |
| Cas13e EGFPgRNA-g2 | GTCCTCCTTGAAGTCGATGCCCTTCAGCTC | 850 |
| Cas13e EGFPgRNA-g3 | TCGCCGTCCAGCTCGACCAGGATGGGCACC | 857 |
| Cas13e EGFPgRNA-g4 | TTCGGGCATGGCGGACTTGAAGAAGTCGTG | 858 |
| VEGFA Cas13egRNA-g1 | GTGCTGTAGGAAGCTCATCTCTCCTATGTG | 879 |
| VEGFA Cas13egRNA-g2 | GGTACTCCTGGAAGATGTCCACCAGGGTCT | 880 |

### Cell Culture, Transfection and Flow Cytometry Analysis

[0593] HEK293T cell lines were purchased from Stem Cell Bank, Chinese Academy of Sciences. HEK293T cell lines were cultured with DMEM (Gibco) supplemented with 10% fetal bovine serum (Gibco), 1% penicillin/streptomycin (Thermo Fisher Scientific) and 0.1 mM non-essential amino acids (Gibco) in an incubator at 37° C. with 5% CO₂. When cells reached 90% confluence, HEK293T cells were passaged at a ratio of 1:4 to 12-well plates. After 12 hr, 2 μg/well plasmids were transfected into cells with Lipofectamine 3000 (Thermo Fisher Scientific) using the standard protocol. 48 hr after transfection, 50,000 of both EGFP and mCherry positive cells were sorted by BD FACS Aria II for RNA extraction. For the groups of mCherry knockdown, total cells of the 12-well plate were collected for RNA extraction. Flow cytometry results were analyzed with FlowJo V10.5.3. For transgene cell lines, cells were expanded cultivation for dox (1 μg/mL) induction.

### Harvest of Total RNA and Quantitative PCR.

[0594] Total RNA was extracted by adding 500 μL Trizol (Invitrogen), 200 μL chloroform to the cells. After centrifuge at 12,000 rpm for 15 min at 4° C., the supernatant was transferred to a 1.5 mL RNase-free tube. 100% isopropanol and 75% alcohol were added to precipitate and purify the RNA. cDNA was prepared using HiScript Q RT SuperMix for qPCR (Vazyme, Biotech) according to manufacturer's instructions.

[0595] qPCR reactions were performed with AceQ qPCR SYBR Green Master Mix (Vazyme, Biotech). All of the reagents were precooled in advance. qPCR results were analyzed with—ΔΔCt method.

### Design and Construct of Cas13d Mutants

[0596] Unbiased all-in-one vectors CAG-Cas13d-U6-DR-gRNA-SV40-EGFP-SV40-mCherry and CMV-Cas13e-SV40-EGFP-SV40-mCherry-U6-DR-gRNA-DR, of which the gRNA target EGFP, were generated firstly. Then, 21 BpiI-harbouring Cas13 mutants, each spanning 36 amino acids, were introduced via site-directed mutagenesis by PCR and Gibson Assembly method using NEBuilder HiFi DNA Assembly Master Mix (New England BioLabs).

[0597] For Cas13d, to cover all the mutable regions, over a hundred of mutants with four or five random amino acid substitutions (replacing all non-alanine to alanine, X>A, and alanine to valine, A>V) were designed and generated by ligating two phosphorylated oligos (one wild-type oligo and the other mutant oligo) into corresponding BpiI-digested backbones.

[0598] To identify roles of amino acids within or nearby mutant N2V8 and N2V7, one more 17-amino-acid-span BpiI-harbouring Cas13 mutants N2R was generated, then single, double, triple or quadruple mutations were introduced by ligating annealed mutant oligos into corresponding BpiI-digested backbones.

[0599] For Cas13e, rationally designed mutants with four or five random amino acid substitutions in two regions (M17 and M18) were generated by ligating annealed mutant oligos into corresponding BpiI-digested backbones.

[0600] I-TASSER were used to perform the protein structure prediction.

### Screening for High-Fidelity Cas13d Using Flow Cytometry Analysis

[0601] Cas13 mutants screening was conducted in 48-well plates, and consolidation performed in 24-well plates. The day before transfection for screening, plate 3×10⁴ cells per well in 0.25 mL of complete growth medium. After 12 hours., 0.5 μg plasmids were transfected into HEK293 cells with 1.25 μg PEI (DNA:PEI=1:2.5).

[0602] For 24-well plates, 1×10⁵ cells were plated per well in 0.5 mL of complete growth medium, 0.8 μm plasmids were transfected into HEK293 cells with 2.5 μg PEI. 48 hours after transfection, cells were analyzed by BD FACS Aria II. Flow cytometry results were analyzed with FlowJo V10.5.3.

### Protein Purification of Cas13

[0603] Cas13 protein purification was performed according to protocol as previously described. The humanized codon-optimized gene for Cas13d/cfCas13d/Cas13e/cfCas13e was synthesized (Huagene) and cloned into a bacterial expression vector (pC013-Twinstrep-SUMO-huLwCas13a, Plasmid #90097) after the plasmid digestion by BamHI and NotI with NEBuilder HiFi DNA Assembly Cloning Kit (New England Biolabs).

[0604] The expression constructs were transformed into BL21 (DE3) (TIANGEN) cells. One liter of LB Broth growth media (Tryptone 10.0 g; Yeast Extract 5.0 g; NaCl 10.0 g, Sangon Biotech) was inoculated with ten mL of 12 hr growing culture. Cells were then grown to a cell density A600 of 0.6 at 37° C., and then SUMO-Cas13 proteins expression was induced by supplementing with 500 mM IPTG. The induced cells were grown at 16° C. for 16-18 hours before harvest by centrifuge (4,000 rpm, 20 min). Collected cells were resuspended in Buffer W (Strep-Tactin Purification Buffer Set, IBA) and lysed using ultrasonic homogenizer (Scientz).

[0605] Cell debris was removed by centrifugation and the clear lysate was loaded onto StrepTactin Sepharose High Performance Column (StrepTrap HP, GE Healthcare). The non-specific binding protein and contaminants were flowed through. The target proteins were eluted with Elution Buffer (Strep-Tactin Purification Buffer Set, IBA). The N-terminal 6× His/Twinstrep-SUMO tag (“6× His” disclosed as SEQ ID NO: 947) was removed by SUMO protease (4° C., >20 hours). Then target proteins were subjected to a final polishing step by gel filtration (S200, GEHealthcare). The purity of >95% was assessed by SDS-PAGE.

Cas13 on-Target and Collateral Cleavage Activity Assay

[0606] Fluorescent labeled ssRNA reporter assay for Cas13 nuclease activity was performed as previously described. For on-target cleavage activity analysis, assays were performed with 45 nM purified Cas13d/cfCas13d/Cas13e/cfCas13e, 22.5 nM crRNA, 125 nM quenched fluorescent RNA reporter (Sangon Biotech), 1 μL murine RNase inhibitor (New England Biolabs), 100 ng of background total human RNA (purified from HEK293T cell culture), and varying amounts of input nucleic acid target, unless otherwise indicated, in nuclease assay buffer (40 mM Tris-HCl including 25 mM Tris-HCl, pH7.5 and 25 mM Tris-HCl, pH7.0, 60 mM NaCl, 6 mM MgCl₂, pH 7.3). Reactions were allowed to proceed for 1-3 hr at 37° C. on a fluorescent plate reader (Analytik Jena) with fluorescent kinetics measured every 5 min.

### RNA-Seq and Analysis

[0607] For transcriptome sequencing, 35 μg all-in-one plasmids were transfected into HEK293 cells cultured in 10-cm dishes. Then 600,000 dual-positive EGFP⁺/mCherry⁺ (top 15%) cells were sorted out to make a pool for sequencing. Total RNA was extracted with TRIZOL-based method, fragmented and reverse transcribed to cDNAs with HiScript Q RT SuperMix for qPCR (Vazyme, Biotech) according to manufacturer's instructions. RNA-seq library was generated and quality was assessed using Illumina Hiseq X-ten platform in Novogene. Differential analysis among cell groups (RPL4 gRNA1, RPL4 gRNA3, PPIA gRNA1, PPIA gRNA2, CA2 gRNA1, and PPARG gRNA1) was done by a count-based method limma, which is implemented in R and voom is involved for normalization. Significantly expressed genes were first screened by BH-adjusted P value 0.05, further filtered with 2 fold-change. After enrichment analysis with GSEA v3.0 (Broad Institute, PreRanked mode), and the t-statistical output from limma as the metrics for ranking, 1,000 gene sets permutations were set as default, and gene sets were obtained through collecting pathways from KEGG and biological processes from GO. A gene set with an FDR P value<0.05 will be considered as significant enrichment.

Growth curve

[0608] Single cell clones with dCas13d/Cas13d/cfCas13d and RPL4 gRNA were plated on a 24-well plate at 2×10⁵ cells/mL with or without dox treated (1 μg/mL). Cell were collected at 24, 48, 72, 96 and 120 hrs. Cell number was counted by an automated cell counter (C10311, Invitrogen). Experiments were performed for three replicates.

### Determination of Cell Proliferation.

[0609] Cell proliferation was assessed by using a colorimetric thiazolyl blue (MTT) assay. Briefly, single cell clones with dCas13d/Cas13d/cfCas13d and RPL4 gRNA were treated with or without dox treated (1 μg/mL) for 0, 24, 48, 72, 96 or 120 hrs. Then each group of cells was collected and further plated on a 24-well plate at 2×10⁵ cells/mL with or without dox treated (1 μg/mL). After an incubation period of 24 hrs at 37° C., the tetrazolium salt MTT (Sigma-Chemie) was added to a final concentration of 2 μg/mL, and incubation was continued for 4 hrs. Cells were washed 3 times and finally lysed with dimethyl sulfoxide. Metabolization of MTT directly correlates with the cell number and was quantitated by measuring the absorbance at 550 nm (reference wavelength, 690 nm) by using a microplate reader (type 7500; Cambridge Technology, Watertown, Mass.). Experiments were performed for five replicates.

### Statisticalal Analysis

[0610] Statisticalal tests performed by Graphpad Prism 8 included the two-tailed unpaired two-sample t-test or the log-rank Mantel-Cox test. The respective statisticalal test used for each figure is noted in the corresponding figure legends and significant statisticalal differences are noted as *P<0.05, **P<0.01, ***P<0.001. All values are reported as mean±s.e.m.

### Example 12 Eliminating Collateral Effects of Cas13f through Mutagenesis

[0611] Collateral RNA degradation by the Cas13 family of effector enzymes has previously been found in glioma cells, flies and mammalian cells. Based on the fast and sensitive dual-fluorescence reporter system for detecting collateral effects as described herein, this example demonstrates that Cas13f could indeed induce substantial collateral effects in HEK293T cells. The example also demonstrates that the collateral effects of other Cas13f can also be diminished (if not eliminated) via mutagenesis, based on the finding that changing RNA-binding cleft proximal to catalytic sites RXXXXH in HEPN domains may selectively decrease promiscuous RNA binding and non-target cleavage, while maintaining on-target RNA cleavage.

[0612] Specifically, to evaluate the collateral effects of Cas13f in mammalian cells, different Cas13f variants were co-transfected with EGFP and mCherry coding sequences, together with targeted (against EGFP) guide RNA (gRNA) into HEK293T cells. Expression levels of the targeted EGFP and the non-targeted mCherry were measured 48 hrs after transfection (FIG. 25).

[0613] A publically available online tool TASSER was used to predict the 3D structure of Cas13f, and the predicted structure was visualized with PyMOL in order to determine the position of the various structual domains in 3D (see FIG. 26).

[0614] Then an unbiased screening system was designed based on the dual-fluorescence system described herein, in which coding sequences for EGFP, mCherry, EGFP-targeting gRNA, together with each Cas13 variants, were inserted into a plasmid for expression in 293T cells. In this system, expression of EGFP and expression of mCherry were driven by the same SV40 promoter, in order to ensure roughly equally stable expression of the reporter genes in the transfected host cell. The gRNA was chosen to be specific for EGFP mRNA. Each coding sequence for Cas13f and variants has an N-terminal and a C-terminal nuclear localization signal (NLS), and expression of Cas13f and variants/mutants was driven by the strong CAG promoter.

[0615] The EGFP and mCherry coding sequences are SEQ ID NOs: 1 and 2, respectively. The corresponding DNA sequence of the gRNA is SEQ ID NO: 3. The SV40 promoter sequence is SEQ ID NO: 104. The wild-type Cas13f protein sequence is SEQ ID NO: 52. The CAG promoter sequence is SEQ ID NO: 103.

[0616] The HEPN1, HEPN2, Helical1 and Helical2 domains of Cas13f were chosen for generating a Cas13f mutagenesis library. First, these regions were divided into 47 small segments (F1-F47), each with about 17 residues (FIG. 27).

[0617] To facilitate subsequent selection, a BpiI restriction enzyme recognition site (GTCTTC, corresponding to encoded residues VF; reverse complement GAAGAC, corresponding to encoded residues ED) was introduced at each end of the segments. When producing mutants, all non-Ala residues were substituted by Ala, and all Ala residues were substituted by Val (e.g., replacing all non-alanine to alanine, X>A, and alanine to valine, A>V). About 4-5 total mutations were introduced between the two BpiI sites flanking each segment. The various mutants so generated and their corresponding wild-type sequences are provided below.

| | | SEQ | | SEQ |
|---|---|---|---|---|
| Variants | Amino Acids | ID NO: | DNA sequence | ID NO: |
| F1V1 | AAIELAAEEAAFAFNQA | 1027 | gccgccATCGAGCTGgccgccGAAGAAGCCGCCTTCgccTTCAATCAGGCC | 1211 |
| F1V2 | NGAEAKKEEAAFYFAAA | 1028 | AATGGCgccGAGgccAAGAAGGAAGAAGCCGCCTTCTACTTCgccgccGCC | 1212 |
| F1V3 | NGIALKKAEAAAYANQA | 1029 | AATGGCATCgccCTGAAGAAGgccGAAGCCGCCgccTACgccAATCAGGCC | 1213 |
| F1V4 | NGIELKKEAVVFYFNQV | 1030 | AATGGCATCGAGCTGAAGAAGGAAgccgtggtgTTCTACTTCAATCAGgtg | 1214 |
| F2V1 | ELALAAIEANIFAAERR | 1031 | GAGCTGgccCTGgccGCCATTGAGgccAACATCTTCgccgccGAGAGAAGA | 1215 |
| F2V2 | EANAKAAEDAIFDKERR | 1032 | GAGgccAACgccAAGGCCgccGAGGACgccATCTTCGACAAGGAGAGAAGA | 1216 |
| F2V3 | ALNLKAIADNAADKERR | 1033 | gccCTGAACCTGAAGGCCATTgccGACAACgccgccGACAAGGAGAGAAGA | 1217 |
| F2V4 | ELNLKVIEDNIFDKAAA | 1034 | GAGCTGAACCTGAAGgtgATTGAGGACAACATCTTCGACAAGgccgccgcc | 1218 |
| F3V1 | AALLAAPQILAAMENFI | 1035 | gccgccCTGCTGgccgccCCCCAGATCCTGGCCgccATGGAGAACTTTATC | 1219 |
| F3V2 | KTAANNPAILAKMEAFI | 1036 | AAGACAgccgccAACAACCCCgccATCCTGGCCAAGATGGAGgccTTTATC | 1220 |
| F3V3 | KTLLNNPQAAAKAENFA | 1037 | AAGACACTGCTGAACAACCCCCAGgccgccGCCAAGgccGAGAACTTTgcc | 1221 |
| F3V4 | KTLLNNAQILVKMANAI | 1038 | AAGACACTGCTGAACAACgccCAGATCCTGgtgAAGATGgccAACgccATC | 1222 |
| F4V1 | FNFRAVAANAAAEIDCL | 1039 | TTCAATTTCCGGgccGTGgccgccAACGCCgccgccGAAATCGACTGCCTG | 1223 |
| F4V2 | FAFRDATKAAKGEIACL | 1040 | TTCgccTTCCGGGACgccACCAAGgccGCCAAGGGCGAAATCgccTGCCTG | 1224 |
| F4V3 | ANFRDVTKNAKGEADAA | 1041 | gccAATTTCCGGGACGTGACCAAGAACGCCAAGGGCGAAgccGACgccgcc | 1225 |
| F4V4 | FNAADVTKNVKGAIDCL | 1042 | TTCAATgccgccGACGTGACCAAGAACgtgAAGGGCgccATCGACTGCCTG | 1226 |
| F5V1 | ALALRELRNFYSHAAHA | 1043 | gccCTGgccCTGAGAGAGCTGcggaacttttacagccacgccgccCACgcc | 1227 |
| F5V2 | LAKAREARNFYSHYVAK | 1044 | CTGgccAAGgccAGAGAGgcccggaacttttacagccacTACGTGgccAAG | 1228 |
| F5V3 | LLKLAALRNFYSHYVHK | 1045 | CTGCTGAAGCTGgccgccCTGcggaacttttacagccacTACGTGCACAAG | 1229 |
| F6V1 | RDVRELAAAEAPILEAY | 1046 | CGGGACGTCAGAGAACTGgccgccgccGAGgccCCGATCCTGGAGgccTAC | 1230 |
| F6V2 | RAAREASKGEKPILEKA | 1047 | CGGgccgccAGAGAAgccAGCAAGGGCGAGAAGCCGATCCTGGAGAAGgcc | 1231 |
| F6V3 | RDVRALSKGAKPAAEKY | 1048 | CGGGACGTCAGAgccCTGAGCAAGGGCgccAAGCCGgccgccGAGAAGTAC | 1232 |
| F6V4 | ADVAELSKGEKAILAKY | 1049 | gccGACGTCgccGAACTGAGCAAGGGCGAGAAGgccATCCTGgccAAGTAC | 1233 |
| F7V1 | YQFAIEAAAAENVALEI | 1050 | TACCAGTTCGCCATCGAAgccgccgccgccGAGAACGTGgccCTCGAAATC | 1234 |
| F7V2 | AAFAIESTGSEAAKLEI | 1051 | gccgccTTCGCCATCGAATCCACCGGCTCTGAGgccgccAAGCTCGAAATC | 1235 |
| F7V3 | YQAAAESTGSENVKAEA | 1052 | TACCAGgccGCCgccGAATCCACCGGCTCTGAGAACGTGAAGgccGAAgcc | 1236 |
| F7V4 | YQFVIASTGSANVKLAI | 1053 | TACCAGTTCgtgATCgccTCCACCGGCTCTgccAACGTGAAGCTCgccATC | 1237 |
| F8V1 | IEAAAWLAAAAALFFLC | 1054 | ATCGAAgccgccGCCTGGCTGGCCgccGCCgccgccCTGTTCTTCCTGTGC | 1238 |
| F8V2 | IENDAWAADAGVAFFAA | 1055 | ATCGAAAACGACGCCTGGgccGCCGACGCCGGCGTGgccTTCTTCgccgcc | 1239 |
| F8V3 | AANDAWLADAGVLAALC | 1056 | gccgccAACGACGCCTGGCTGGCCGACGCCGGCGTGCTGgccgccCTGTGC | 1240 |
| F8V4 | IENDVALVDVGVLFFLC | 1057 | ATCGAAAACGACgtggccCTGgtgGACgtgGGCGTGCTGTTCTTCCTGTGC | 1241 |
| F9V1 | IFLAAAQANALIAGISG | 1058 | ATCTTCCTGgccgccgccCAGGCAAACgccCTGATCgccGGCATCAGCGGC | 1242 |
| F9V2 | IFLKKSQAAKLISAIAA | 1059 | ATCTTCCTGAAGAAGAGCCAGGCAgccAAGCTGATCAGCgccATCgccgcc | 1243 |
| F9V3 | AFAKKSAANKAISGISG | 1060 | gccTTCgccAAGAAGAGCgccGCAAACAAGgccATCAGCGGCATCAGCGGC | 1244 |
| F9V4 | IALKKSQVNKLASGASG | 1061 | ATCgccCTGAAGAAGAGCCAGgtgAACAAGCTGgccAGCGGCgccAGCGGC | 1245 |
| F10V1 | FARNADAAQPRRNLFAY | 1062 | TTCgccAGAAACgccGACgccgccCAGCCTCGGAGAAACCTGTTCgccTAC | 1246 |
| F10V2 | FKRADATGQPRRALFTA | 1063 | TTCAAGAGAgccGACgccACCGGCCAGCCTCGGAGAgccCTGTTCACCgcc | 1247 |
| F10V3 | AKRNDDTGAPRRNAATY | 1064 | gccAAGAGAAACGACGACACCGGCgccCCTCGGAGAAACgccgccACCTAC | 1248 |
| F10V4 | FKANDDTGQAAANLFTY | 1065 | TTCAAGgccAACGACGACACCGGCCAGgccgccgccAACCTGTTCACCTAC | 1249 |
| F11V1 | FAIREAAAVVPEMQAHF | 1066 | TTCgccATCCGGGAGgccgccgccGTGGTGCCCGAAATGCAGgccCACTTC | 1250 |
| F11V2 | FSIREGYKAAPEMAKAF | 1067 | TTCTCCATCCGGGAGGGCTACAAGgccgccCCCGAAATGgccAAGgccTTC | 1251 |
| F11V3 | ASAREGYKVVPEAQKHA | 1068 | gccTCCgccCGGGAGGGCTACAAGGTGGTGCCCGAAgccCAGAAGCACgcc | 1252 |
| F11V4 | FSIAAGYKVVAAMQKHF | 1069 | TTCTCCATCgccgccGGCTACAAGGTGGTGgccgccATGCAGAAGCACTTC | 1253 |
| F12V1 | LLFALVNHLANQAAAIE | 1070 | CTGCTGTTCgccCTGGTGAACCACCTGgccAACCAGgccgccgccATCGAA | 1254 |
| F12V2 | LLFSLAAHLSAADDYIE | 1071 | CTGCTGTTCTCCCTGgccgccCACCTGAGCgccgccGACGATTATATCGAA | 1255 |
| F12V3 | AAFSAVNHASNQDDYIE | 1072 | gccgccTTCTCCgccGTGAACCACgccAGCAACCAGGACGATTATATCGAA | 1256 |
| F12V4 | LLASLVNALSNQDDYAA | 1073 | CTGCTGgccTCCCTGGTGAACgccCTGAGCAACCAGGACGATTATgccgcc | 1257 |
| F13V1 | AAHQPAAIAEALFFHRI | 1074 | gccGCCCACCAGCCCgccgccATCgccGAGgccCTCTTCTTCCACCGGATT | 1258 |
| F13V2 | KAAAPYDIGEGAFFARI | 1075 | AAGGCCgccgccCCCTACGACATCGGCGAGGGCgccTTCTTCgccCGGATT | 1259 |
| F13V3 | KAHQPYDAGEGLAAHRA | 1076 | AAGGCCCACCAGCCCTACGACgccGGCGAGGGCCTCgccgccCACCGGgcc | 1260 |
| F13V4 | KVHQAYDIGAGLFFHAI | 1077 | AAGgtgCACCAGgccTACGACATCGGCgccGGCCTCTTCTTCCACgccATT | 1261 |
| F14V1 | AAAFLNIAAILRNMAFY | 1078 | GCCgccgccTTCCTGAACATCgccgccATCCTGAGAAACATGgccTTCTAC | 1262 |
| F14V2 | ASTFAAISGILRAMKFA | 1079 | GCCAGCACCTTCgccgccATCTCCGGAATCCTGAGAgccATGAAGTTCgcc | 1263 |
| F14V3 | ASTFLNASGAARNAKFY | 1080 | GCCAGCACCTTCCTGAACgccTCCGGAgccgccAGAAACgccAAGTTCTAC | 1264 |
| F14V4 | VSTALNISGILANMKAY | 1081 | gtgAGCACCgccCTGAACATCTCCGGAATCCTGgccAACATGAAGgccTAC | 1265 |
| F15V1 | AYQAARLVEQRAELARE | 1082 | gccTATCAGgccgccAGACTGGTGGAGCAGAGAgccGAGCTGgccCGGGAA | 1266 |
| F15V2 | TAASKRLAEARGELKRE | 1083 | ACCgccgccAGCAAGAGACTGgccGAGgccAGAGGCGAGCTGAAGCGGGAA | 1267 |
| F15V3 | TYQSKRAVAQRGAAKRE | 1084 | ACCTATCAGAGCAAGAGAgccGTGgccCAGAGAGGCgccgccAAGCGGGAA | 1268 |
| F15V4 | TYQSKALVEQAGELKAA | 1085 | ACCTATCAGAGCAAGgccCTGGTGGAGCAGgccGGCGAGCTGAAGgccgcc | 1269 |
| F16V1 | AAIFAWEEPFQANAAFE | 1086 | gccgccATCTTCGCCTGGGAAGAACCGTTTCAGgccAATgccgccTTTGAG | 1270 |
| F16V2 | KDAAAWEEPFAGASYFE | 1087 | AAGGACgccgccGCCTGGGAAGAACCGTTTgccGGCgccTCCTACTTTGAG | 1271 |
| F16V3 | KDIFAWAAPAQGNSYAE | 1088 | AAGGACATCTTCGCCTGGgccgccCCGgccCAGGGCAATTCCTACgccGAG | 1272 |
| F16V4 | KDIFVAEEAFQGNSYFA | 1089 | AAGGACATCTTCgtggccGAAGAAgccTTTCAGGGCAATTCCTACTTTgcc | 1273 |
| F17V1 | INAHAAVIAEDELAELC | 1090 | ATCAACgccCACgccgccGTGATTgccGAGGACGAGCTGgccGAGCTGTGC | 1274 |
| F17V2 | IAGHKGAIGEAEAKELC | 1091 | ATCgccGGCCACAAGGGCgccATTGGCGAGgccGAGgccAAGGAGCTGTGC | 1275 |
| F17V3 | ANGAKGVIGEDELKEAA | 1092 | gccAACGGCgccAAGGGCGTGATTGGCGAGGACGAGCTGAAGGAGgccgcc | 1276 |
| F17V4 | INGHKGVAGADALKALC | 1093 | ATCAACGGCCACAAGGGCGTGgccGGCgccGACgccCTGAAGgccCTGTGC | 1277 |
| F18V1 | AAFLIANQAANAVEARI | 1094 | gccGCCTTCCTGATCgccAACCAGgccGCCAACgccGTGGAGgccCGGATC | 1278 |
| F18V2 | YAFLIGAADAAKAEGRI | 1095 | TACGCCTTCCTGATCGGCgccgccGACGCCgccAAGgccGAGGGCCGGATC | 1279 |
| F18V3 | YAAAAGNQDANKVEGRA | 1096 | TACGCCgccgccgccGGCAACCAGGACGCCAACAAGGTGGAGGGCCGGgcc | 1280 |
| F18V4 | YVFLIGNQDVNKVAGAI | 1097 | TACgtgTTCCTGATCGGCAACCAGGACgtgAACAAGGTGgccGGCgccATC | 1281 |
| F19V1 | AQFLEAFRAANAVQQVA | 1098 | gccCAGTTCCTGGAGgccTTCAGAgccGCCAACgccGTGCAGCAGGTGgcc | 1282 |
| F19V2 | TAFLEKFRNAASAQQAK | 1099 | ACCgccTTCCTGGAGAAGTTCAGAAACGCCgccAGCgccCAGCAGgccAAG | 1283 |
| F19V3 | TQAAEKFRNANSVAAVK | 1100 | ACCCAGgccgccGAGAAGTTCAGAAACGCCAACAGCGTGgccgccGTGAAG | 1284 |
| F19V4 | TQFLAKAANVNSVQQVK | 1101 | ACCCAGTTCCTGgccAAGgccgccAACgtgAACAGCGTGCAGCAGGTGAAG | 1285 |
| F20V1 | AAEMLAPEAFPANAFAE | 1102 | gccgccGAGATGCTGgccCCTGAAgccTTCCCCGCCAACgccTTTGCCGAG | 1286 |
| F20V2 | DDEAAKPEYAPAAYFAE | 1103 | GACGACGAGgccgccAAGCCTGAATATgccCCCGCCgccTACTTTGCCGAG | 1287 |
| F20V3 | DDAMLKPAYFPANYAAA | 1104 | GACGACgccATGCTGAAGCCTgccTATTTCCCCGCCAACTACgccGCCgcc | 1288 |
| F20V4 | DDEMLKAEYFAVNYFVE | 1105 | GACGACGAGATGCTGAAGgccGAATATTTCgccgtgAACTACTTTgtgGAG | 1289 |
| F21V1 | AAVARIADRVLNRLNAA | 1106 | gccgccGTGgccCGGATCgccGACCGGGTGCTGAACAGACTGAACgccGCC | 1290 |
| F21V2 | SGAGRIKARVLARLAKA | 1107 | AGCGGCgccGGCCGGATCAAGgccCGGGTGCTGgccAGACTGgccAAGGCC | 1291 |
| F21V3 | SGVGRAKDRAANRANKA | 1108 | AGCGGCGTGGGCCGGgccAAGGACCGGgccgccAACAGAgccAACAAGGCC | 1292 |
| F21V4 | SGVGAIKDAVLNALNKV | 1109 | AGCGGCGTGGGCgccATCAAGGACgccGTGCTGAACgccCTGAACAAGgtg | 1293 |
| F22V1 | IASNAAAAGEIIAYDAM | 1110 | ATCgccAGCAACgccGCCgccgccGGCGAGATCATCGCCTATGACgccATG | 1294 |
| F22V2 | IKANKAKKAEIIAAAKM | 1111 | ATCAAGgccAACAAGGCCAAGAAGgccGAGATCATCGCCgccgccAAGATG | 1295 |
| F22V3 | AKSAKAKKGEAIAYDKA | 1112 | gccAAGAGCgccAAGGCCAAGAAGGGCGAGgccATCGCCTATGACAAGgcc | 1296 |
| F22V4 | IKSNKVKKGAIAVYDKM | 1113 | ATCAAGAGCAACAAGgtgAAGAAGGGCgccATCgccgtgTATGACAAGATG | 1297 |
| F23V1 | REVMAFIAAALPVAEAL | 1114 | AGAGAAGTGATGGCTTTCATCgccgccgccCTGCCCGTGgccGAGgccCTG | 1298 |
| F23V2 | REAMAFINNSAPADEKA | 1115 | AGAGAAgccATGGCTTTCATCAATAACTCTgccCCCgccGACGAGAAGgcc | 1299 |
| F23V3 | RAVAAAANNSLPVDEKL | 1116 | AGAgccGTGgccGCTgccgccAATAACTCTCTGCCCGTGGACGAGAAGCTG | 1300 |
| F23V4 | AEVMVFINNSLAVDAKL | 1117 | gccGAAGTGATGgtgTTCATCAATAACTCTCTGgccGTGGACgccAAGCTG | 1301 |
| F24V1 | APAAYARYLAMVRFWDR | 1118 | gccCCCgccgccTACgccAGATACCTGgccATGGTGAGATTCTGGGATAGA | 1302 |
| F24V2 | KPKDAKRALGMARFWAR | 1119 | AAGCCCAAGGATgccAAGAGAgccCTGGGCATGgccAGATTCTGGgccAGA | 1303 |
| F24V3 | KAKDYKRYAGAVRAWDR | 1120 | AAGgccAAGGATTACAAGAGATACgccGGCgccGTGAGAgccTGGGATAGA | 1304 |
| F24V4 | KPKDYKAYLGMVAFADA | 1121 | AAGCCCAAGGATTACAAGgccTACCTGGGCATGGTGgccTTCgccGATgcc | 1305 |
| F25V1 | EADNIAREFETAEWAAY | 1122 | GAAgccGACAATATCgccCGCGAGTTCGAAACGgccGAGTGGgccgccTAT | 1306 |
| F25V2 | EKAAIKREFEAKEWSKA | 1123 | GAAAAGgccgccATCAAGCGCGAGTTCGAAgccAAGGAGTGGAGCAAGgcc | 1307 |
| F25V3 | AKDNAKRAAETKEWSKY | 1124 | gccAAGGACAATgccAAGCGCgccgccGAAACGAAGGAGTGGAGCAAGTAT | 1308 |
| F25V4 | EKDNIKAEFATKAASKY | 1125 | GAAAAGGACAATATCAAGgccGAGTTCgccACGAAGgccgccAGCAAGTAT | 1309 |
| F26V1 | LPANFWAAANLERVAAL | 1126 | CTGCCCgccAACTTCTGGgccGCCgccAACCTGGAGAGAGTGgccgccCTG | 1310 |
| F26V2 | APSAFWTAKALERAYGL | 1127 | gccCCCTCCgccTTCTGGACCGCCAAGgccCTGGAGAGAgccTACGGACTG | 1311 |
| F26V3 | LPSNAWTAKNAARVYGA | 1128 | CTGCCCTCCAACgccTGGACCGCCAAGAACgccgccAGAGTGTACGGAgcc | 1312 |
| F26V4 | LASNFATVKNLEAVYGL | 1129 | CTGgccTCCAACTTCgccACCgtgAAGAACCTGGAGgccGTGTACGGACTG | 1313 |
| F27V1 | AREAAAELFNALAAAVE | 1130 | GCCCGGGAAgccgccGCAGAGCTGTTTAACgccCTGgccGCCgccGTGGAG | 1314 |
| F27V2 | AREKNAEAFAKAKADAE | 1131 | GCCCGGGAAAAGAACGCAGAGgccTTTgccAAGgccAAGGCCGACgccGAG | 1315 |
| F27V3 | ARAKNAALANKLKADVA | 1132 | GCCCGGgccAAGAACGCAgccCTGgccAACAAGCTGAAGGCCGACGTGgcc | 1316 |
| F27V4 | VAEKNVELFNKLKVDVE | 1133 | gtggccGAAAAGAACgtgGAGCTGTTTAACAAGCTGAAGgtgGACGTGGAG | 1317 |
| F28V1 | AMAERELEAYQAINDAA | 1134 | gccATGgccGAAAGAGAGCTGGAAgccTATCAGgccATCAACGACGCCgcc | 1318 |
| F28V2 | KMDERELEKAAKIAAAK | 1135 | AAGATGGACGAAAGAGAGCTGGAAAAGgccgccAAGATCgccgccGCCAAG | 1319 |
| F28V3 | KADAREAEKYQKANDAK | 1136 | AAGgccGACgccAGAGAGgccGAAAAGTATCAGAAGgccAACGACGCCAAG | 1320 |
| F28V4 | KMDEAALAKYQKINDVK | 1137 | AAGATGGACGAAgccgccCTGgccAAGTATCAGAAGATCAACGACgtgAAG | 1321 |
| F29V1 | ALANLRRLAAAFAVAWE | 1138 | gccCTGGCCAACCTGCGGCGGCTGGCCgccgccTTCgccGTGgccTGGGAG | 1322 |
| F29V2 | DAAAARRLASDFGAKWE | 1139 | GATgccGCCgccgccCGGCGGCTGGCCAGCGACTTCGGAgccAAGTGGGAG | 1323 |
| F29V3 | DLVNLRRAASDAGVKWA | 1140 | GATCTGgtgAACCTGCGGCGGgccGCCAGCGACgccGGAGTGAAGTGGgcc | 1324 |
| F29V4 | DLANLAALVSDFGVKAE | 1141 | GATCTGGCCAACCTGgccgccCTGgtgAGCGACTTCGGAGTGAAGgccGAG | 1325 |
| F30V1 | EADWDEYAAQIAAQITD | 1142 | GAGgccGATTGGGACGAGTACgccgccCAGATCgccgccCAGATCACAGAT | 1326 |
| F30V2 | EKAWAEYSGQIKKQIAA | 1143 | GAGAAGgccTGGgccGAGTACTCCGGCCAGATCAAGAAGCAGATCgccgcc | 1327 |
| F30V3 | EKDWDEASGAAKKAITD | 1144 | GAGAAGGATTGGGACGAGgccTCCGGCgccgccAAGAAGgccATCACAGAT | 1328 |
| F30V4 | AKDADAYSGQIKKQATD | 1145 | gccAAGGATgccGACgccTACTCCGGCCAGATCAAGAAGCAGgccACAGAT | 1329 |
| F31V1 | AQALTIMAQRITAGLAA | 1146 | gccCAGgccCTGACCATCATGgccCAGAGAATCACAGCCGGCCTGgccgcc | 1330 |
| F31V2 | SAKLAIMKQRIAAALKK | 1147 | TCCgccAAGCTGgccATCATGAAGCAGAGAATCgccGCCgccCTGAAGAAG | 1331 |
| F31V3 | SQKATIAKARITAGAKK | 1148 | TCCCAGAAGgccACCATCgccAAGgccAGAATCACAGCCGGCgccAAGAAG | 1332 |
| F31V4 | SQKLTAMKQAATVGLKK | 1149 | TCCCAGAAGCTGACCgccATGAAGCAGgccgccACAgtgGGCCTGAAGAAG | 1333 |
| F32V1 | AHAIENLNLRIAIAINA | 1150 | gccCACgccATCGAAAACCTGAACCTGAGGATCgccATCgccATCAACgcc | 1334 |
| F32V2 | KHGIEAAALRITIDIAK | 1151 | AAGCACGGCATCGAAgccgccgccCTGAGGATCACCATCGACATCgccAAG | 1335 |
| F32V3 | KAGAENLNARATIDINK | 1152 | AAGgccGGCgccGAAAACCTGAACgccAGGgccACCATCGACATCAACAAG | 1336 |
| F32V4 | KHGIANLNLAITADANK | 1153 | AAGCACGGCATCgccAACCTGAACCTGgccATCACCgccGACgccAACAAG | 1337 |
| F33V1 | ARAAVLARIAIPRAFVA | 1154 | gccAGAgccGCCGTGCTGgccCGGATCGCCATCCCCAGAgccTTTGTGgcc | 1338 |
| F33V2 | SRKAAANRAAIPRGFAK | 1155 | TCCAGAAAGGCCgccgccAATCGGgccGCCATCCCCAGAGGATTTgccAAG | 1339 |
| F33V3 | SRKVVLNRIAAARGAVK | 1156 | TCCAGAAAGgtgGTGCTGAATCGGATCGCCgccgccAGAGGAgccGTGAAG | 1340 |
| F33V4 | SAKAVLNAIVIPAGFVK | 1157 | TCCgccAAGGCCGTGCTGAATgccATCgtgATCCCCgccGGATTTGTGAAG | 1341 |
| F34V1 | RHILGWQEAEAVAAAIR | 1158 | CGGCACATCCTGGGCTGGCAGGAAgccGAGgccGTGgccgccgccATCAGA | 1342 |
| F34V2 | RHIAAWAESEKASKKIR | 1159 | CGGCACATCgccgccTGGgccGAATCCGAGAAGgccAGCAAGAAGATCAGA | 1343 |
| F34V3 | RAALGWQASEKVSKKAR | 1160 | CGGgccgccCTGGGCTGGCAGgccTCCGAGAAGGTGAGCAAGAAGgccAGA | 1344 |
| F34V4 | AHILGAQESAKVSKKIA | 1161 | gccCACATCCTGGGCgccCAGGAATCCgccAAGGTGAGCAAGAAGATCgcc | 1345 |
| F35V1 | EAECEILLAAEAEELAA | 1162 | GAAGCCGAATGCGAGATTCTGCTGgccgccGAGgccGAGGAGCTGgccgcc | 1346 |
| F35V2 | EAEAEIAASKEYEEASK | 1163 | GAAGCCGAAgCCGAGATTgCCgCCAGCAAGGAGTACGAGGAGgCCAGCAAG | 1347 |
| F35V3 | AAACAALLSKEYEELSK | 1164 | gccGCCgccTGCgccgccCTGCTGAGCAAGGAGTACGAGGAGCTGAGCAAG | 1348 |
| F35V4 | EVECEILLSKAYAALSK | 1165 | GAAgtgGAATGCGAGATTCTGCTGAGCAAGgccTACgccgccCTGAGCAAG | 1349 |
| F36V1 | QFFQAADYDAMARINAL | 1166 | CAGTTCTTTCAGgccgccGACTACGACgccATGgccCGCATCAACgccCTG | 1350 |
| F36V2 | QFFQSKAAAKMTRIAGL | 1167 | CAGTTCTTTCAGAGCAAGgccgccgccAAGATGACCCGCATCgccGGCCTG | 1351 |
| F36V3 | AFFASKDYDKATRINGA | 1168 | gccTTCTTTgccAGCAAGGACTACGACAAGgccACCCGCATCAACGGCgcc | 1352 |
| F36V4 | QAAQSKDYDKMTAANGL | 1169 | CAGgccgccCAGAGCAAGGACTACGACAAGATGACCgccgccAACGGCCTG | 1353 |
| F37V1 | AEANALIALMAVALMAQ | 1170 | gccGAGgccAATgccCTGATCGCCCTGATGGCCGTGgccCTGATGgccCAG | 1354 |
| F37V2 | YEKAKAIALMAAYLMGA | 1171 | TACGAGAAGgccAAGgccATCGCCCTGATGGCCgccTATCTGATGGGGgcc | 1355 |
| F37V3 | YEKNKLIAAAAVYAAGQ | 1172 | TACGAGAAGAATAAGCTGATCGCCgccgccGCCGTGTATgccgccGGGCAG | 1356 |
| F37V4 | YAKNKLAVLMVVYLMGQ | 1173 | TACgccAAGAATAAGCTGgccgtgCTGATGgtgGTGTATCTGATGGGGCAG | 1357 |
| F38V1 | LRILFAEHAALDDIAAT | 1174 | CTGAGAATCCTGTTCgccGAGCACgccgccCTGGACGACATCgccgccACC | 1358 |
| F38V2 | ARILFKEHTKLAAITKA | 1175 | gccAGAATCCTGTTCAAGGAGCACACCAAGCTGgccgccATCACCAAGgcc | 1359 |
| F38V3 | LRAAFKEATKADDITKT | 1176 | CTGAGAgccgccTTCAAGGAGgccACCAAGgccGACGACATCACCAAGACC | 1360 |
| F38V4 | LAILAKAHTKLDDATKT | 1177 | CTGgccATCCTGgccAAGgccCACACCAAGCTGGACGACgccACCAAGACC | 1361 |
| F39V1 | TVDFAIADAVTVAIPFA | 1178 | ACCGTGGATTTCgccATCgccGACgccGTGACCGTGgccATCCCCTTCgcc | 1362 |
| F39V2 | AVAFKISAKVAVKIPFS | 1179 | gccGTGgccTTCAAGATCAGCgccAAGGTGgccGTGAAGATCCCCTTCTCC | 1363 |
| F39V3 | TADFKASDKATAKIPFS | 1180 | ACCgccGATTTCAAGgccAGCGACAAGgccACCgccAAGATCCCCTTCTCC | 1364 |
| F39V4 | TVDAKISDKVTVKAAAS | 1181 | ACCGTGGATgccAAGATCAGCGACAAGGTGACCGTGAAGgccgccgccTCC | 1365 |
| F40V1 | NYPALVYAMAAAYVDNI | 1182 | AACTATCCCgccCTGGTGTACgccATGgccgccgccTACGTGGACAATATC | 1366 |
| F40V2 | NAPSLVATMSSKAVANI | 1183 | AACgccCCCTCCCTGGTGgccACCATGAGCAGCAAGgccGTGgccAATATC | 1367 |
| F40V3 | AYPSLAYTMSSKYADAI | 1184 | gccTATCCCTCCCTGgccTACACCATGAGCAGCAAGTACgccGACgccATC | 1368 |
| F40V4 | NYASAVYTASSKYVDNA | 1185 | AACTATgccTCCgccGTGTACACCgccAGCAGCAAGTACGTGGACAATgcc | 1369 |
| F41V1 | GNYGFANADADAPILGA | 1186 | GGCAACTACGGCTTCgccAACgccGACgccGATgccCCCATTCTGGGCgcc | 1370 |
| F41V2 | ANYAFSNKAKDKPILAK | 1187 | gccAACTACgccTTCAGCAACAAGgccAAGGATAAGCCCATTCTGgccAAG | 1371 |
| F41V3 | GAAGFSAKDKAKPILGK | 1188 | GGCgccgccGGCTTCAGCgccAAGGACAAGgccAAGCCCATTCTGGGCAAG | 1372 |
| F41V4 | GNYGASNKDKDKAAAGK | 1189 | GGCAACTACGGCgccAGCAACAAGGACAAGGATAAGgccgccgccGGCAAG | 1373 |
| F42V1 | IAAIEAQRMEFIAEVLA | 1190 | ATCgccgccATCGAGgccCAGCGGATGGAGTTTATCgccGAGGTGCTGgcc | 1374 |
| F42V2 | IDVIEKARAEFIKEAAG | 1191 | ATCGACGTGATCGAGAAGgccCGGgccGAGTTTATCAAGGAGgccgccGGA | 1375 |
| F42V3 | ADVAEKQRMEAAKEVLG | 1192 | gccGACGTGgccGAGAAGCAGCGGATGGAGgccgccAAGGAGGTGCTGGGA | 1376 |
| F42V4 | IDVIAKQAMAFIKAVLG | 1193 | ATCGACGTGATCgccAAGCAGgccATGgccTTTATCAAGgccGTGCTGGGA | 1377 |
| F43V1 | FEAYLFDDAIIDAAAFA | 1194 | TTCGAGgccTACCTGTTTGACGATgccATCATCGACgccgccgccTTCGCC | 1378 |
| F43V2 | FEKALFAAKIIAKSKFA | 1195 | TTCGAGAAGgccCTGTTTgccgccAAGATCATCgccAAGAGCAAGTTCGCC | 1379 |
| F43V3 | AEKYAFDDKAADKSKFA | 1196 | gccGAGAAGTACgccTTTGACGATAAGgccgccGACAAGAGCAAGTTCGCC | 1380 |
| F43V4 | FAKYLADDKIIDKSKAV | 1197 | TTCgccAAGTACCTGgccGACGATAAGATCATCGACAAGAGCAAGgccgtg | 1381 |
| F44V1 | AAAAHIAFAEIAEELVE | 1198 | gccgccGCCgccCACATCgccTTTGCCGAAATCgccGAAGAACTGGTGGAG | 1382 |
| F44V2 | DTATAASFAEIVEEAAE | 1199 | GACACCGCCACCgccgccAGCTTTGCCGAAATCGTGGAAGAAgccgccGAG | 1383 |
| F44V3 | DTATHISAAAAVAELVE | 1200 | GACACCGCCACCCACATCAGCgccGCCgccgccGTGgccGAACTGGTGGAG | 1384 |
| F44V4 | DTVTHISFVEIVEALVA | 1201 | GACACCgtgACCCACATCAGCTTTgtgGAAATCGTGGAAgccCTGGTGgcc | 1385 |
| F45V1 | AAWAADRLA | 1202 | gccgccTGGgccgccGACCGGCTGgcc | 1386 |
| F45V2 | KGADKAAAT | 1203 | AAGGGCgccGACAAGgccgccgccACG | 1387 |
| F46V1 | LAALAAARNKALHAEIL | 1204 | CTGgccgccCTGgccgccGCCcggaacaaggccctgcacgccGAGATCCTG | 1388 |
| F46V2 | ATKAKDARNKALHGEAA | 1205 | gccACGAAGgccAAGGATGCCcggaacaaggccctgcacGGCGAGgccgcc | 1389 |
| F46V3 | LTKLKDVRNKALHGAIL | 1206 | CTGACGAAGCTGAAGGATgtgcggaacaaggccctgcacGGCgccATCCTG | 1390 |
| F47V1 | TGTAFDETAALINELAA | 1207 | ACCGGCACCgccTTCGACGAGACAgccgccCTGATCAACGAGCTGgccgcc | 1391 |
| F47V2 | AAASFDEAKSLINELKK | 1208 | gccgccgccAGCTTCGACGAGgccAAGTCCCTGATCAACGAGCTGAAGAAG | 1392 |
| F47V3 | TGTSFAETKSAIAEAKK | 1209 | ACCGGCACCAGCTTCgccGAGACAAAGTCCgccATCgccGAGgccAAGAAG | 1393 |
| F47V4 | TGTSADATKSLANALKK | 1210 | ACCGGCACCAGCgCCGACgCCACAAAGTCCCTGgCCAACgCCCTGAAGAAG | 1394 |

[0618] Using the EGFP-mCherry dual-fluorescence reporter system of the invention, these Cas13f mutants were functionally screened to assess their collateral vs. gRNA-guided cleavage activities. Specifically, according to standard cell culture methods, human HEK293 cells were grown in 24-well tissue culture plates to a suitable density before the cells were transfected with PEI reagents and plasmids that express each mutant Cas13f and the reporter system fluorescent proteins. Transfected cells were cultured at 37° C. in incubator under 5% CO₂ for about 48 hours, before measuring EGFP and mCherry signals in the cells with FACS. Mutants leading to low percentage of the gRNA-targeted EGFP signal (lower percentage of EGFP⁺ cells, as a readout for preserved gRNA-guided cleavage) and high percentage of non-targeted mCherry signal (higher percentage of mCherry⁺ cells, as a readout for lacking collateral effect) were selected.

[0619] In this experiment, dCas13f with no gRNA-guided cleavage was used as a negative control, and the results (mean±s.e.m.) were normalized against that of dCas13f and listed below. Cas13f mutants/variants located at the upper left area of FIG. 28 had low collateral effect (high mCherry signal) and high gRNA-guided cleavage activity (low EGFP signal), and were selected as the desired low/no collateral effect mutants.

| | % mCherry | S.E.M. | % EGFP | S.E.M. |
|---|---|---|---|---|
| dead | 1.0000 | 0.0089 | 1.0000 | 0.0040 |
| WT | 0.5278 | 0.0124 | 0.0944 | 0.0035 |
| F2V1 | 0.8439 | 0.0205 | 0.6276 | 0.0123 |
| F2V2 | 0.8266 | 0.0220 | 0.4340 | 0.0103 |
| F2V3 | 0.4429 | 0.0017 | 0.1445 | 0.0033 |
| F2V4 | 0.6268 | 0.0094 | 0.2191 | 0.0016 |
| F3V1 | 0.5784 | 0.0045 | 0.1915 | 0.0047 |
| F3V2 | 0.9749 | 0.0113 | 0.4988 | 0.0093 |
| F3V3 | 0.7297 | 0.0216 | 0.2525 | 0.0102 |
| F3V4 | 0.5909 | 0.0071 | 0.1112 | 0.0078 |
| F4V1 | 0.6783 | 0.0092 | 0.3402 | 0.0141 |
| F4V2 | 0.9468 | 0.0096 | 0.9054 | 0.0078 |
| F4V3 | 0.3446 | 0.0102 | 0.0775 | 0.0030 |
| F4V4 | 0.9046 | 0.0260 | 0.7416 | 0.0141 |
| F5V1 | 0.9385 | 0.0143 | 0.5379 | 0.0094 |
| F5V2 | 0.5352 | 0.0108 | 0.1281 | 0.0025 |
| F5V3 | 0.5405 | 0.0127 | 0.1688 | 0.0074 |
| F6V1 | 0.8309 | 0.0077 | 0.2858 | 0.0053 |
| F6V2 | 0.6913 | 0.0091 | 0.3636 | 0.0075 |
| F6V3 | 0.3426 | 0.0028 | 0.0829 | 0.0017 |
| F6V4 | 0.6262 | 0.0143 | 0.1283 | 0.0025 |
| F7V1 | 0.5315 | 0.0096 | 0.0960 | 0.0019 |
| F7V2 | 0.8915 | 0.0086 | 0.1956 | 0.0100 |
| F7V3 | 0.6861 | 0.0153 | 0.4122 | 0.0042 |
| F7V4 | 0.4794 | 0.0023 | 0.2748 | 0.0031 |
| F7V4 | 0.8393 | 0.0086 | 0.6918 | 0.0117 |
| F8V1 | 0.8171 | 0.0068 | 0.7974 | 0.0122 |
| F8V2 | 0.8228 | 0.0034 | 0.7836 | 0.0024 |
| F8V3 | 0.8180 | 0.0083 | 0.8101 | 0.0093 |
| F8V4 | 0.3162 | 0.0040 | 0.0494 | 0.0020 |
| F9V1 | 0.8656 | 0.0120 | 0.4549 | 0.0124 |
| F9V2 | 0.4951 | 0.0023 | 0.1051 | 0.0019 |
| F9V3 | 0.6949 | 0.0557 | 0.7116 | 0.0375 |
| F9V4 | 0.6677 | 0.0017 | 0.6370 | 0.0052 |
| F10V1 | 0.8131 | 0.0050 | 0.2123 | 0.0102 |
| F10V2 | 0.3165 | 0.0091 | 0.0470 | 0.0023 |
| F10V3 | 0.8360 | 0.0082 | 0.7123 | 0.0091 |
| F10V4 | 0.8215 | 0.0088 | 0.0929 | 0.0018 |
| F38V1 | 0.3261 | 0.0046 | 0.0381 | 0.0019 |
| F38V2 | 0.2031 | 0.0040 | 0.0350 | 0.0007 |
| F38V3 | 0.3078 | 0.0062 | 0.0526 | 0.0011 |
| F38V4 | 0.5860 | 0.0101 | 0.0904 | 0.0069 |
| F39V1 | 0.4731 | 0.0220 | 0.0736 | 0.0043 |
| F39V2 | 0.4639 | 0.0044 | 0.0386 | 0.0026 |
| F39V3 | 0.9212 | 0.0257 | 0.3547 | 0.0187 |
| F39V4 | 0.9168 | 0.0279 | 0.4272 | 0.0062 |
| F40V1 | 0.6440 | 0.0283 | 0.0856 | 0.0052 |
| F40V2 | 0.9857 | 0.0083 | 0.2711 | 0.0053 |
| F40V3 | 0.2644 | 0.0085 | 0.0341 | 0.0031 |
| F40V4 | 0.8524 | 0.0109 | 0.1698 | 0.0068 |
| F41V1 | 0.5281 | 0.0089 | 0.0963 | 0.0057 |
| F41V2 | 0.3567 | 0.0149 | 0.0644 | 0.0040 |
| F41V3 | 0.7446 | 0.0137 | 0.0886 | 0.0055 |
| F41V4 | 0.8726 | 0.0120 | 0.3435 | 0.0193 |
| F42V1 | 0.2398 | 0.0069 | 0.0306 | 0.0004 |
| F42V2 | 0.6810 | 0.0327 | 0.5106 | 0.0245 |
| F42V3 | 0.8821 | 0.0002 | 0.8702 | 0.0032 |
| F42V4 | 0.6718 | 0.0222 | 0.2016 | 0.0114 |
| F43V1 | 0.5508 | 0.0189 | 0.1999 | 0.0111 |
| F43V2 | 0.2909 | 0.0072 | 0.0293 | 0.0009 |
| F43V3 | 0.8538 | 0.0147 | 0.7331 | 0.0183 |
| F43V4 | 0.9133 | 0.0152 | 0.8146 | 0.0136 |
| F44V1 | 0.4936 | 0.0106 | 0.0585 | 0.0020 |
| F44V2 | 0.8519 | 0.0183 | 0.2728 | 0.0106 |
| F44V3 | 0.8813 | 0.0144 | 0.5960 | 0.0070 |
| F44V3 | 0.9420 | 0.0104 | 0.8856 | 0.0150 |
| F44V4 | 0.2871 | 0.0161 | 0.0262 | 0.0019 |
| F45V1 | 0.4907 | 0.0173 | 0.1229 | 0.0062 |
| F45V2 | 0.3045 | 0.0085 | 0.0459 | 0.0029 |
| F46V1 | 0.4139 | 0.0096 | 0.0477 | 0.0020 |
| F46V2 | 0.8899 | 0.0091 | 0.8797 | 0.0066 |
| F46V3 | 0.2017 | 0.0084 | 0.0199 | 0.0003 |
| F47V1 | 0.8500 | 0.0091 | 0.4965 | 0.0026 |
| F47V1 | 0.4331 | 0.0100 | 0.0602 | 0.0009 |
| F47V2 | 0.2973 | 0.0138 | 0.0347 | 0.0035 |
| F47V3 | 0.3790 | 0.0179 | 0.0607 | 0.0049 |
| F47V4 | 0.8356 | 0.0064 | 0.7086 | 0.0107 |

[0620] After normalization of EGFP and mCherry fluorescence intensity by inactive dead Cas13f (dCas13f with R77A, H82A, R764A, and H769A mutations in HEPN domains), it was found that variants with mutation sites in F10, F38, F40, or F46, specially F10V1, F10V4, F38V2, F40V2, F40V4, F46V1 and F46V3, exhibited relatively low EGFP fluorescence intensity but much higher (or lower) mCherry fluorescence intensity compared to wild-type, indicating that these variants retained a high on-target activity but greatly reduced (or enhanced) collateral activity (FIG. 28).

[0621] Further mutagenesis study in or nearby these regions (F10V1, F10V4, F38V2, F40V2, F40V4, F46V1 and F46V3) of these mutants was conducted, by generating a number of additional mutants with single or multiple (e.g., double, triple, or quadruple) combination mutations. The sequences of these mutants/variants are listed below:

| | | SEQ | | SEQ |
|---|---|---|---|---|
| Variants | Amino Acids | ID NO: | DNA sequense | ID NO: |
| F10S1 | AKRNDDTGQPRRNLFTY | 1395 | gccAAGAGAAACGACGACACCGGCCAGCCTCGGAGAAACCTGTTCACCTAC | 1515 |
| F10S2 | FARNDDTGQPRRNLFTY | 1396 | TTCgccAGAAACGACGACACCGGCCAGCCTCGGAGAAACCTGTTCACCTAC | 1516 |
| F10S3 | FKANDDTGQPRRNLFTY | 1397 | TTCAAGgccAACGACGACACCGGCCAGCCTCGGAGAAACCTGTTCACCTAC | 1517 |
| F10S4 | FKRADDTGQPRRNLFTY | 1398 | TTCAAGAGAgccGACGACACCGGCCAGCCTCGGAGAAACCTGTTCACCTAC | 1518 |
| F10S5 | FKRNADTGQPRRNLFTY | 1399 | TTCAAGAGAAACgccGACACCGGCCAGCCTCGGAGAAACCTGTTCACCTAC | 1519 |
| F10S6 | FKRNDATGQPRRNLFTY | 1400 | TTCAAGAGAAACGACgccACCGGCCAGCCTCGGAGAAACCTGTTCACCTAC | 1520 |
| F10S7 | FKRNDDAGQPRRNLFTY | 1401 | TTCAAGAGAAACGACGACgccGGCCAGCCTCGGAGAAACCTGTTCACCTAC | 1521 |
| F10S8 | FKRNDDTAQPRRNLFTY | 1402 | TTCAAGAGAAACGACGACACCgccCAGCCTCGGAGAAACCTGTTCACCTAC | 1522 |
| F10S9 | FKRNDDTGAPRRNLFTY | 1403 | TTCAAGAGAAACGACGACACCGGCgccCCTCGGAGAAACCTGTTCACCTAC | 1523 |
| F10S10 | FKRNDDTGQARRNLFTY | 1404 | TTCAAGAGAAACGACGACACCGGCCAGgccCGGAGAAACCTGTTCACCTAC | 1524 |
| F10S11 | FKRNDDTGQPARNLFTY | 1405 | TTCAAGAGAAACGACGACACCGGCCAGCCTgccAGAAACCTGTTCACCTAC | 1525 |
| F10S12 | FKRNDDTGQPRANLFTY | 1406 | TTCAAGAGAAACGACGACACCGGCCAGCCTCGGgccAACCTGTTCACCTAC | 1526 |
| F10S13 | FKRNDDTGQPRRALFTY | 1407 | TTCAAGAGAAACGACGACACCGGCCAGCCTCGGAGAgccCTGTTCACCTAC | 1527 |
| F10S14 | FKRNDDTGQPRRNAFTY | 1408 | TTCAAGAGAAACGACGACACCGGCCAGCCTCGGAGAAACgccTTCACCTAC | 1528 |
| F10S15 | FKRNDDTGQPRRNLATY | 1409 | TTCAAGAGAAACGACGACACCGGCCAGCCTCGGAGAAACCTGgccACCTAC | 1529 |
| F10S16 | FKRNDDTGQPRRNLFAY | 1410 | TTCAAGAGAAACGACGACACCGGCCAGCCTCGGAGAAACCTGTTCgccTAC | 1530 |
| F10S17 | FKRNDDTGQPRRNLFTA | 1411 | TTCAAGAGAAACGACGACACCGGCCAGCCTCGGAGAAACCTGTTCACCgcc | 1531 |
| F38S1 | ARILFKEHTKLDDITKT | 1412 | gccAGAATCCTGTTCAAGGAGCACACCAAGCTGGACGACATCACCAAGACC | 1532 |
| F38S2 | LAILFKEHTKLDDITKT | 1413 | CTGgccATCCTGTTCAAGGAGCACACCAAGCTGGACGACATCACCAAGACC | 1533 |
| F38S3 | LRALFKEHTKLDDITKT | 1414 | CTGAGAgccCTGTTCAAGGAGCACACCAAGCTGGACGACATCACCAAGACC | 1534 |
| F38S4 | LRIAFKEHTKLDDITKT | 1415 | CTGAGAATCgccTTCAAGGAGCACACCAAGCTGGACGACATCACCAAGACC | 1535 |
| F38S5 | LRILAKEHTKLDDITKT | 1416 | CTGAGAATCCTGgCCAAGGAGCACACCAAGCTGGACGACATCACCAAGACC | 1536 |
| F38S6 | LRILFAEHTKLDDITKT | 1417 | CTGAGAATCCTGTTCgccGAGCACACCAAGCTGGACGACATCACCAAGACC | 1537 |
| F38S7 | LRILFKAHTKLDDITKT | 1418 | CTGAGAATCCTGTTCAAGgccCACACCAAGCTGGACGACATCACCAAGACC | 1538 |
| F38S8 | LRILFKEATKLDDITKT | 1419 | CTGAGAATCCTGTTCAAGGAGgccACCAAGCTGGACGACATCACCAAGACC | 1539 |
| F38S9 | LRILFKEHAKLDDITKT | 1420 | CTGAGAATCCTGTTCAAGGAGCACgccAAGCTGGACGACATCACCAAGACC | 1540 |
| F38S10 | LRILFKEHTALDDITKT | 1421 | CTGAGAATCCTGTTCAAGGAGCACACCgccCTGGACGACATCACCAAGACC | 1541 |
| F38S11 | LRILFKEHTKADDITKT | 1422 | CTGAGAATCCTGTTCAAGGAGCACACCAAGgccGACGACATCACCAAGACC | 1542 |
| F38S12 | LRILFKEHTKLADITKT | 1423 | CTGAGAATCCTGTTCAAGGAGCACACCAAGCTGgccGACATCACCAAGACC | 1543 |
| F38S13 | LRILFKEHTKLDAITKT | 1424 | CTGAGAATCCTGTTCAAGGAGCACACCAAGCTGGACgccATCACCAAGACC | 1544 |
| F38S14 | LRILFKEHTKLDDATKT | 1425 | CTGAGAATCCTGTTCAAGGAGCACACCAAGCTGGACGACgccACCAAGACC | 1545 |
| F38S15 | LRILFKEHTKLDDIAKT | 1426 | CTGAGAATCCTGTTCAAGGAGCACACCAAGCTGGACGACATCgccAAGACC | 1546 |
| F38S16 | LRILFKEHTKLDDITAT | 1427 | CTGAGAATCCTGTTCAAGGAGCACACCAAGCTGGACGACATCACCgccACC | 1547 |
| F38S17 | LRILFKEHTKLDDITKA | 1428 | CTGAGAATCCTGTTCAAGGAGCACACCAAGCTGGACGACATCACCAAGgcc | 1548 |
| F40S1 | AYPSLVYTMSSKYVDNI | 1429 | gccTATCCCTCCCTGGTGTACACCATGAGCAGCAAGTACGTGGACAATATC | 1549 |
| F40S2 | NAPSLVYTMSSKYVDNI | 1430 | AACgccCCCTCCCTGGTGTACACCATGAGCAGCAAGTACGTGGACAATATC | 1550 |
| F40S3 | NYASLVYTMSSKYVDNI | 1431 | AACTATgccTCCCTGGTGTACACCATGAGCAGCAAGTACGTGGACAATATC | 1551 |
| F40S4 | NYPALVYTMSSKYVDNI | 1432 | AACTATCCCgccCTGGTGTACACCATGAGCAGCAAGTACGTGGACAATATC | 1552 |
| F40S5 | NYPSAVYTMSSKYVDNI | 1433 | AACTATCCCTCCgccGTGTACACCATGAGCAGCAAGTACGTGGACAATATC | 1553 |
| F40S6 | NYPSLAYTMSSKYVDNI | 1434 | AACTATCCCTCCCTGgccTACACCATGAGCAGCAAGTACGTGGACAATATC | 1554 |
| F40S7 | NYPSLVATMSSKYVDNI | 1435 | AACTATCCCTCCCTGGTGgccACCATGAGCAGCAAGTACGTGGACAATATC | 1555 |
| F40S8 | NYPSLVYAMSSKYVDNI | 1436 | AACTATCCCTCCCTGGTGTACgccATGAGCAGCAAGTACGTGGACAATATC | 1556 |
| F40S9 | NYPSLVYTASSKYVDNI | 1437 | AACTATCCCTCCCTGGTGTACACCgccAGCAGCAAGTACGTGGACAATATC | 1557 |
| F40S10 | NYPSLVYTMASKYVDNI | 1438 | AACTATCCCTCCCTGGTGTACACCATGgccAGCAAGTACGTGGACAATATC | 1558 |
| F40S11 | NYPSLVYTMSAKYVDNI | 1439 | AACTATCCCTCCCTGGTGTACACCATGAGCgccAAGTACGTGGACAATATC | 1559 |
| F40S12 | NYPSLVYTMSSAYVDNI | 1440 | AACTATCCCTCCCTGGTGTACACCATGAGCAGCgccTACGTGGACAATATC | 1560 |
| F40S13 | NYPSLVYTMSSKAVDNI | 1441 | AACTATCCCTCCCTGGTGTACACCATGAGCAGCAAGgccGTGGACAATATC | 1561 |
| F40S14 | NYPSLVYTMSSKYADNI | 1442 | AACTATCCCTCCCTGGTGTACACCATGAGCAGCAAGTACgccGACAATATC | 1562 |
| F40S15 | NYPSLVYTMSSKYVANI | 1443 | AACTATCCCTCCCTGGTGTACACCATGAGCAGCAAGTACGTGgccAATATC | 1563 |
| F40S16 | NYPSLVYTMSSKYVDAI | 1444 | AACTATCCCTCCCTGGTGTACACCATGAGCAGCAAGTACGTGGACgccATC | 1564 |
| F40S17 | NYPSLVYTMSSKYVDNA | 1445 | AACTATCCCTCCCTGGTGTACACCATGAGCAGCAAGTACGTGGACAATgcc | 1565 |
| F46S1 | ATKLKDARNKALHGEIL | 1446 | gccACGAAGCTGAAGGATGCCcggaacAAGGCCCTGcacGGCGAGATCCTG | 1566 |
| F46S2 | LAKLKDARNKALHGEIL | 1447 | CTGgccAAGCTGAAGGATGCCcggaacAAGGCCCTGcacGGCGAGATCCTG | 1567 |
| F46S3 | LTALKDARNKALHGEIL | 1448 | CTGACGgccCTGAAGGATGCCcggaacAAGGCCCTGcacGGCGAGATCCTG | 1568 |
| F46S4 | LTKAKDARNKALHGEIL | 1449 | CTGACGAAGgccAAGGATGCCcggaacAAGGCCCTGcacGGCGAGATCCTG | 1569 |
| F46S5 | LTKLADARNKALHGEIL | 1450 | CTGACGAAGCTGgccGATGCCcggaacAAGGCCCTGcacGGCGAGATCCTG | 1570 |
| F46S6 | LTKLKAARNKALHGEIL | 1451 | CTGACGAAGCTGAAGgccGCCcggaacAAGGCCCTGcacGGCGAGATCCTG | 1571 |
| F46S7 | LTKLKDVRNKALHGEIL | 1452 | CTGACGAAGCTGAAGGATgtgcggaacAAGGCCCTGcacGGCGAGATCCTG | 1572 |
| F46S10 | LTKLKDARNAALHGEIL | 1453 | CTGACGAAGCTGAAGGATGCCcggaacgccGCCCTGcacGGCGAGATCCTG | 1573 |
| F46S11 | LTKLKDARNKVLHGEIL | 1454 | CTGACGAAGCTGAAGGATGCCcggaacAAGgtgCTGcacGGCGAGATCCTG | 1574 |
| F46S12 | LTKLKDARNKAAHGEIL | 1455 | CTGACGAAGCTGAAGGATGCCcggaacAAGGCCgcccacGGCGAGATCCTG | 1575 |
| F46S14 | LTKLKDARNKALHAEIL | 1456 | CTGACGAAGCTGAAGGATGCCcggaacAAGGCCCTGcacgccGAGATCCTG | 1576 |
| F46S15 | LTKLKDARNKALHGAIL | 1457 | CTGACGAAGCTGAAGGATGCCcggaacAAGGCCCTGcacGGCgccATCCTG | 1577 |
| F46S16 | LTKLKDARNKALHGEAL | 1458 | CTGACGAAGCTGAAGGATGCCcggaacAAGGCCCTGcacGGCGAGgccCTG | 1578 |
| F46S17 | LTKLKDARNKALHGEIA | 1459 | CTGACGAAGCTGAAGGATGCCcggaacAAGGCCCTGcacGGCGAGATCgcc | 1579 |
| F10S18 | FARNADAAQPRRNLFTY | 1460 | TTCgccAGAAACgccGACgccgccCAGCCTCGGAGAAACCTGTTCACCTAC | 1580 |
| F10S19 | FARNADAGQPRRNLFAY | 1461 | TTCgccAGAAACgccGACgccGGCCAGCCTCGGAGAAACCTGTTCgccTAC | 1581 |
| F10S20 | FARNADTAQPRRNLFAY | 1462 | TTCgccAGAAACgccGACACCgccCAGCCTCGGAGAAACCTGTTCgccTAC | 1582 |
| F10S21 | FARNDDAAQPRRNLFAY | 1463 | TTCgccAGAAACGACGACgccgccCAGCCTCGGAGAAACCTGTTCgccTAC | 1583 |
| F10S22 | FKRNADAAQPRRNLFAY | 1464 | TTCAAGAGAAACgccGACgccgccCAGCCTCGGAGAAACCTGTTCgccTAC | 1584 |
| F10S23 | FARNADAGQPRRNLFTY | 1465 | TTCgccAGAAACgccGACgccGGCCAGCCTCGGAGAAACCTGTTCACCTAC | 1585 |
| F10S24 | FARNADTAQPRRNLFTY | 1466 | TTCgccAGAAACgccGACACCgccCAGCCTCGGAGAAACCTGTTCACCTAC | 1586 |
| F10S25 | FARNADTGQPRRNLFAY | 1467 | TTCgccAGAAACgccGACACCGGCCAGCCTCGGAGAAACCTGTTCgccTAC | 1587 |
| F10S26 | FARNDDAAQPRRNLFTY | 1468 | TTCgccAGAAACGACGACgccgccCAGCCTCGGAGAAACCTGTTCACCTAC | 1588 |
| F10S27 | FARNDDAGQPRRNLFAY | 1469 | TTCgccAGAAACGACGACgccGGCCAGCCTCGGAGAAACCTGTTCgccTAC | 1589 |
| F10S28 | FARNDDTAQPRRNLFAY | 1470 | TTCgccAGAAACGACGACACCgccCAGCCTCGGAGAAACCTGTTCgccTAC | 1590 |
| F10S29 | FKRNADAAQPRRNLFTY | 1471 | TTCAAGAGAAACgccGACgccgccCAGCCTCGGAGAAACCTGTTCACCTAC | 1591 |
| F10S30 | FKRNADAGQPRRNLFAY | 1472 | TTCAAGAGAAACgccGACgccGGCCAGCCTCGGAGAAACCTGTTCgccTAC | 1592 |
| F10S31 | FKRNADTAQPRRNLFAY | 1473 | TTCAAGAGAAACgccGACACCgccCAGCCTCGGAGAAACCTGTTCgccTAC | 1593 |
| F10S32 | FKRNDDAAQPRRNLFAY | 1474 | TTCAAGAGAAACGACGACgccgccCAGCCTCGGAGAAACCTGTTCgccTAC | 1594 |
| F10S33 | FARNADTGQPRRNLFTY | 1475 | TTCgccAGAAACgccGACACCGGCCAGCCTCGGAGAAACCTGTTCACCTAC | 1595 |
| F10S34 | FARNDDAGQPRRNLFTY | 1476 | TTCgccAGAAACGACGACgccGGCCAGCCTCGGAGAAACCTGTTCACCTAC | 1596 |
| F10S35 | FARNDDTAQPRRNLFTY | 1477 | TTCgccAGAAACGACGACACCgccCAGCCTCGGAGAAACCTGTTCACCTAC | 1597 |
| F10S36 | FARNDDTGQPRRNLFAY | 1478 | TTCgccAGAAACGACGACACCGGCCAGCCTCGGAGAAACCTGTTCgccTAC | 1598 |
| F10S37 | FKRNADAGQPRRNLFTY | 1479 | TTCAAGAGAAACgccGACgccGGCCAGCCTCGGAGAAACCTGTTCACCTAC | 1599 |
| F10S38 | FKRNADTAQPRRNLFTY | 1480 | TTCAAGAGAAACgccGACACCgccCAGCCTCGGAGAAACCTGTTCACCTAC | 1600 |
| F10S39 | FKRNADTGQPRRNLFAY | 1481 | TTCAAGAGAAACgccGACACCGGCCAGCCTCGGAGAAACCTGTTCgccTAC | 1601 |
| F10S40 | FKRNDDAAQPRRNLFTY | 1482 | TTCAAGAGAAACGACGACgccgccCAGCCTCGGAGAAACCTGTTCACCTAC | 1602 |
| F10S41 | FKRNDDAGQPRRNLFAY | 1483 | TTCAAGAGAAACGACGACgccGGCCAGCCTCGGAGAAACCTGTTCgccTAC | 1603 |
| F10S42 | FKRNDDTAQPRRNLFAY | 1484 | TTCAAGAGAAACGACGACACCgccCAGCCTCGGAGAAACCTGTTCgccTAC | 1604 |
| F10S43 | FKANDDTGQAARNLFTY | 1485 | TTCAAGgccAACGACGACACCGGCCAGgccgccAGAAACCTGTTCACCTAC | 1605 |
| F10S44 | FKANDDTGQARANLFTY | 1486 | TTCAAGgccAACGACGACACCGGCCAGgccCGGgccAACCTGTTCACCTAC | 1606 |
| F10S45 | FKANDDTGQPAANLFTY | 1487 | TTCAAGgccAACGACGACACCGGCCAGCCTgccgccAACCTGTTCACCTAC | 1607 |
| F10S46 | FKRNDDTGQAAANLFTY | 1488 | TTCAAGAGAAACGACGACACCGGCCAGgccgccgccAACCTGTTCACCTAC | 1608 |
| F10S47 | FKANDDTGQARRNLFTY | 1489 | TTCAAGgccAACGACGACACCGGCCAGgccCGGAGAAACCTGTTCACCTAC | 1609 |
| F10S48 | FKANDDTGQPARNLFTY | 1490 | TTCAAGgccAACGACGACACCGGCCAGCCTgccAGAAACCTGTTCACCTAC | 1610 |
| F10S49 | FKANDDTGQPRANLFTY | 1491 | TTCAAGgccAACGACGACACCGGCCAGCCTCGGgccAACCTGTTCACCTAC | 1611 |
| F10S50 | FKRNDDTGQAARNLFTY | 1492 | TTCAAGAGAAACGACGACACCGGCCAGgccgccAGAAACCTGTTCACCTAC | 1612 |
| F10S51 | FKRNDDTGQARANLFTY | 1493 | TTCAAGAGAAACGACGACACCGGCCAGgccCGGgccAACCTGTTCACCTAC | 1613 |
| F10S52 | FKRNDDTGQPAANLFTY | 1494 | TTCAAGAGAAACGACGACACCGGCCAGCCTgccgccAACCTGTTCACCTAC | 1614 |
| F40S18 | NAPSLVATMSSKAVDNI | 1495 | AACgccCCCTCCCTGGTGgccACCATGAGCAGCAAGgccGTGGACAATATC | 1615 |
| F40S19 | NAPSLVATMSSKYVANI | 1496 | AACgccCCCTCCCTGGTGgccACCATGAGCAGCAAGTACGTGgccAATATC | 1616 |
| F40S20 | NAPSLVYTMSSKAVANI | 1497 | AACgccCCCTCCCTGGTGTACACCATGAGCAGCAAGgccGTGgccAATATC | 1617 |
| F40S21 | NYPSLVATMSSKAVANI | 1498 | AACTATCCCTCCCTGGTGgccACCATGAGCAGCAAGgccGTGgccAATATC | 1618 |
| F40S22 | NAPSLVATMSSKYVDNI | 1499 | AACgccCCCTCCCTGGTGgccACCATGAGCAGCAAGTACGTGGACAATATC | 1619 |
| F40S23 | NAPSLVYTMSSKAVDNI | 1500 | AACgccCCCTCCCTGGTGTACACCATGAGCAGCAAGgccGTGGACAATATC | 1620 |
| F40S24 | NAPSLVYTMSSKYVANI | 1501 | AACgccCCCTCCCTGGTGTACACCATGAGCAGCAAGTACGTGgccAATATC | 1621 |
| F40S25 | NYPSLVATMSSKAVDNI | 1502 | AACTATCCCTCCCTGGTGgccACCATGAGCAGCAAGgccGTGGACAATATC | 1622 |
| F40S26 | NYPSLVATMSSKYVANI | 1503 | AACTATCCCTCCCTGGTGgccACCATGAGCAGCAAGTACGTGgccAATATC | 1623 |
| F40S27 | NYPSLVYTMSSKAVANI | 1504 | AACTATCCCTCCCTGGTGTACACCATGAGCAGCAAGgccGTGgccAATATC | 1624 |
| F40S28 | NYASAVYTASSKYVDNI | 1505 | AACTATgccTCCgccGTGTACACCgccAGCAGCAAGTACGTGGACAATATC | 1625 |
| F40S29 | NYASAVYTMSSKYVDNA | 1506 | AACTATgccTCCgccGTGTACACCATGAGCAGCAAGTACGTGGACAATgcc | 1626 |
| F40S30 | NYASLVYTASSKYVDNA | 1507 | AACTATgccTCCCTGGTGTACACCgccAGCAGCAAGTACGTGGACAATgcc | 1627 |
| F40S31 | NYPSAVYTASSKYVDNA | 1508 | AACTATCCCTCCgccGTGTACACCgccAGCAGCAAGTACGTGGACAATgcc | 1628 |
| F40S32 | NYASAVYTMSSKYVDNI | 1509 | AACTATgccTCCgccGTGTACACCATGAGCAGCAAGTACGTGGACAATATC | 1629 |
| F40S33 | NYASLVYTASSKYVDNI | 1510 | AACTATgccTCCCTGGTGTACACCgccAGCAGCAAGTACGTGGACAATATC | 1630 |
| F40S34 | NYASLVYTMSSKYVDNA | 1511 | AACTATgccTCCCTGGTGTACACCATGAGCAGCAAGTACGTGGACAATgcc | 1631 |
| F40S35 | NYPSAVYTASSKYVDNI | 1512 | AACTATCCCTCCgccGTGTACACCgccAGCAGCAAGTACGTGGACAATATC | 1632 |
| F40S36 | NYPSAVYTMSSKYVDNA | 1513 | AACTATCCCTCCgccGTGTACACCATGAGCAGCAAGTACGTGGACAATgcc | 1633 |
| F40S37 | NYPSLVYTASSKYVDNA | 1514 | AACTATCCCTCCCTGGTGTACACCgccAGCAGCAAGTACGTGGACAATgcc | 1634 |

[0622] In this experiment, dCas13f with no gRNA-guided cleavage was used as a negative control, and the results (mean±s.e.m.) were normalized against that of dCas13f and listed below. Cas13f mutants located at the upper left area of FIG. 29 had low collateral effect (high mCherry signal) and high gRNA-guided cleavage activity (low EGFP signal), and were selected as the desired low/no collateral effect mutants.

| | % mCherry | S.E.M. | % EGFP | S.E.M. |
|---|---|---|---|---|
| dead | 1 | 0.023131 | 1 | 0.01545 |
| WT | 0.328068 | 0.001057 | 0.042958 | 0.000813 |
| F10V1 | 0.761218 | 0.005948 | 0.362324 | 0.000881 |
| F10V4 | 0.691621 | 0.003172 | 0.103638 | 0.002507 |
| F38V2 | 0.221726 | 0.00152 | 0.032981 | 0.001559 |
| F40V2 | 0.972985 | 0.002644 | 0.351174 | 0.010436 |
| F40V4 | 0.735119 | 0.011235 | 0.165258 | 0.002711 |
| F46V1 | 0.466461 | 0.009847 | 0.103756 | 0.002033 |
| F46V3 | 0.141941 | 0.003569 | 0.013439 | 0.00044 |
| F38S2 | 0.213141 | 0.00423 | 0.02993 | 6.78E-05 |
| F38S3 | 0.315018 | 0.007798 | 0.045305 | 0.000271 |
| F38S4 | 0.160027 | 0.000661 | 0.021596 | 0.000542 |
| F38S5 | 0.213255 | 0.001124 | 0.028521 | 0.00061 |
| F38S6 | 0.206616 | 0.002181 | 0.02338 | 0.000217 |
| F38S7 | 0.176969 | 0.00185 | 0.022887 | 0.001152 |
| F38S8 | 0.196085 | 0.00033 | 0.020164 | 0.00164 |
| F38S9 | 0.199748 | 0.002049 | 0.025822 | 0.000949 |
| F38S10 | 0.138851 | 0.002445 | 0.018545 | 0.000542 |
| F38S11 | 0.177999 | 0.008922 | 0.022418 | 0.001423 |
| F38S12 | 0.135302 | 0.001322 | 0.017019 | 0.001559 |
| F38S13 | 0.19826 | 0.001454 | 0.027817 | 0.000474 |
| F38S15 | 0.172161 | 0.000661 | 0.017758 | 0.000861 |
| F38S16 | 0.194025 | 0.000727 | 0.0227 | 0.000854 |
| F38S17 | 0.20158 | 0.003503 | 0.020305 | 0.000339 |
| F40S1 | 0.230197 | 0.002842 | 0.025704 | 0.000203 |
| F40S2 | 0.213828 | 0.010971 | 0.018897 | 0.00061 |
| F40S3 | 0.178915 | 0.004296 | 0.02007 | 0.001016 |
| F40S4 | 0.163347 | 0.001917 | 0.019836 | 0.00061 |
| F40S5 | 0.226648 | 0.000264 | 0.033216 | 0.000203 |
| F40S6 | 0.203755 | 0.000529 | 0.024061 | 6.78E-05 |
| F40S7 | 0.632669 | 0.016192 | 0.072887 | 0.001288 |
| F40S8 | 0.22951 | 0.001917 | 0.027277 | 0.001111 |
| F40S9 | 0.505266 | 0.029872 | 0.087559 | 0.002846 |
| F40S11 | 0.502404 | 0.006939 | 0.096596 | 0.000339 |
| F40S12 | 0.488095 | 0.002776 | 0.11608 | 6.78E-05 |
| F40S13 | 0.485234 | 0.000991 | 0.186972 | 0.001559 |
| F40S14 | 0.445971 | 0.001586 | 0.123826 | 0.005489 |
| F40S15 | 0.322001 | 0.00271 | 0.100235 | 0.000813 |
| F40S16 | 0.255952 | 0.017183 | 0.097887 | 0.000949 |
| F40S17 | 0.495765 | 0.016853 | 0.125352 | 0.002168 |
| F40S18 | 0.293842 | 0.013152 | 0.208451 | 0.004201 |
| F40S19 | 0.39011 | 0.022338 | 0.148239 | 0.002778 |
| F40S20 | 0.367674 | 0.011764 | 0.208099 | 0.00332 |
| F40S21 | 0.906593 | 0.002644 | 0.262324 | 0.000474 |
| F40S22 | 0.811928 | 0.004164 | 0.138498 | 0.003659 |
| F40S25 | 0.68109 | 0.033705 | 0.330282 | 0.000271 |
| F40S26 | 0.87065 | 0.021413 | 0.163263 | 0.00576 |
| F40S28 | 0.597756 | 0.006212 | 0.066526 | 0.000759 |
| F40S29 | 0.503205 | 0.001454 | 0.107981 | 0.001762 |
| F40S30 | 0.641598 | 0.005882 | 0.166901 | 0.003659 |
| F40S31 | 0.859661 | 0.001983 | 0.298122 | 0.002033 |
| F40S32 | 0.465545 | 0.006146 | 0.066549 | 0.000203 |
| F40S33 | 0.372253 | 0.013614 | 0.058685 | 0.002033 |
| F40S34 | 0.30506 | 0.004957 | 0.044484 | 0.001694 |
| F40S35 | 0.573832 | 0.000859 | 0.080164 | 0.001559 |
| F40S36 | 0.84913 | 0.009252 | 0.217371 | 0.002033 |
| F40S37 | 0.670673 | 0.031656 | 0.12946 | 0.00576 |
| F46S1 | 0.213713 | 0.000727 | 0.041315 | 0.000678 |
| F46S2 | 0.758013 | 0.030401 | 0.83885 | 0.025412 |
| F46S4 | 0.222184 | 0.000859 | 0.051878 | 0.000407 |
| F46S5 | 0.356227 | 0.004494 | 0.035446 | 0.001762 |
| F46S6 | 0.153159 | 0.005948 | 0.021009 | 0.00061 |
| F46S7 | 0.21875 | 0.003899 | 0.024061 | 0.000474 |
| F46S10 | 0.213599 | 0.00119 | 0.030869 | 0.001152 |
| F46S11 | 0.474359 | 0.01216 | 0.080047 | 0.001355 |
| F46S12 | 0.2856 | 0.013152 | 0.067371 | 0.002846 |
| F46S14 | 0.167468 | 0.008525 | 0.023709 | 0.000271 |
| F46S15 | 0.110577 | 0.002115 | 0.013146 | 0.000542 |
| F10S1 | 0.478709 | 0.004626 | 0.093192 | 0.000813 |
| F10S2 | 0.609547 | 0.000859 | 0.080845 | 0.002114 |
| F10S3 | 0.280105 | 0.005089 | 0.024613 | 0.001376 |
| F10S4 | 0.137477 | 6.61E-05 | 0.017723 | 0.000339 |
| F10S5 | 0.130952 | 0.008459 | 0.026995 | 0.000271 |
| F10S6 | 0.130609 | 0.005882 | 0.014789 | 0.001084 |
| F10S8 | 0.287202 | 0.002577 | 0.026056 | 0.000678 |
| F10S9 | 0.165865 | 0.002313 | 0.014812 | 0.000108 |
| F10S10 | 0.235462 | 0.000727 | 0.019683 | 0.001105 |
| F10S12 | 0.642399 | 0.012689 | 0.075129 | 0.001227 |
| F10S13 | 0.290636 | 0.002974 | 0.035211 | 0.000678 |
| F10S17 | 0.297276 | 0.001124 | 0.067488 | 0.000474 |
| F10S18 | 0.709936 | 0.00608 | 0.130399 | 0.001288 |
| F10S19 | 0.794414 | 0.010574 | 0.274413 | 0.013146 |
| F10S21 | 0.769345 | 0.00033 | 0.232629 | 0.004066 |
| F10S22 | 0.442193 | 0.005353 | 0.12723 | 0.004608 |
| F10S23 | 0.730426 | 0.00033 | 0.149178 | 0.000881 |
| F10S24 | 0.779304 | 0.012689 | 0.139319 | 0.002778 |
| F10S26 | 0.795215 | 0.012359 | 0.145775 | 0.000813 |
| F10S27 | 0.786287 | 0.007336 | 0.209038 | 0.006167 |
| F10S28 | 0.731456 | 0.015729 | 0.21115 | 0.002236 |
| F10S29 | 0.363439 | 0.009186 | 0.050822 | 0.001152 |
| F10S30 | 0.418613 | 0.000463 | 0.124296 | 0.000474 |
| F10S31 | 0.563187 | 0.006609 | 0.153169 | 0.001423 |
| F10S32 | 0.31353 | 0.011962 | 0.061854 | 6.78E-05 |
| F10S33 | 0.833562 | 0.011499 | 0.151526 | 0.006031 |
| F10S34 | 0.786516 | 0.017513 | 0.108099 | 0.003727 |
| F10S35 | 0.815018 | 0.00727 | 0.112559 | 0.001559 |
| F10S36 | 0.810897 | 0.003833 | 0.212207 | 0.006641 |
| F10S37 | 0.322688 | 0.007468 | 0.043192 | 0.00393 |
| F10S38 | 0.444254 | 0.006014 | 0.093075 | 0.002507 |
| F10S39 | 0.495192 | 0.004626 | 0.161033 | 0.011791 |
| F10S40 | 0.320169 | 0.004957 | 0.028239 | 0.00042 |
| F10S41 | 0.36424 | 0.006873 | 0.078286 | 0.000203 |
| F10S42 | 0.456731 | 0.010442 | 0.096009 | 0.00122 |
| F10S43 | 0.634043 | 0.002842 | 0.059272 | 0.002643 |
| F10S44 | 0.704556 | 0.01606 | 0.093897 | 0.002033 |
| F10S45 | 0.902701 | 0.009252 | 0.204812 | 0.002778 |
| F10S46 | 0.790179 | 0.005221 | 0.146244 | 0.002033 |
| F10S47 | 0.562729 | 0.005155 | 0.057864 | 0.003591 |
| F10S48 | 0.849245 | 0.02214 | 0.101526 | 0.005624 |
| F10S49 | 0.863897 | 0.012755 | 0.132629 | 0.001491 |
| F10S50 | 0.724359 | 0.010574 | 0.09162 | 0.002534 |
| F10S51 | 0.644116 | 0.000198 | 0.094836 | 0.005557 |
| F10S52 | 0.695513 | 0.004097 | 0.194249 | 0.005353 |
| F10S7 | 0.249313 | 0.006741 | 0.024308 | 0.000603 |
| F10S11 | 0.650069 | 0.006014 | 0.089977 | 0.000122 |
| F10S14 | 0.279075 | 0.009252 | 0.033568 | 0.001084 |
| F10S15 | 0.421016 | 0.008459 | 0.113615 | 0.004472 |
| F10S16 | 0.410027 | 0.016126 | 0.119836 | 0.006031 |
| F10S20 | 0.667353 | 0.012557 | 0.251526 | 0.00698 |
| F10S25 | 0.895147 | 0.010574 | 0.280869 | 0.005895 |
| F10S43 | 0.694712 | 0.003899 | 0.051479 | 0.000718 |
| F38S1 | 0.214744 | 0.000264 | 0.01912 | 0.000332 |
| F38S13 | 0.246223 | 0.011169 | 0.02723 | 0.000678 |
| F40S10 | 0.384272 | 0.010244 | 0.04554 | 0.000678 |
| F40S23 | 0.863782 | 0.005551 | 0.144836 | 0.000407 |
| F40S24 | 0.565247 | 0.007666 | 0.04142 | 0.000996 |
| F40S27 | 0.818109 | 0.016853 | 0.087676 | 0.001559 |
| F46S2 | 0.244391 | 0.000727 | 0.025822 | 0.000407 |
| F46S3 | 0.903159 | 0.018108 | 0.861502 | 0.023717 |
| F46S16 | 0.43544 | 0.016787 | 0.055516 | 0.000881 |
| F46S17 | 0.270833 | 0.004891 | 0.033216 | 0.000745 |
| F40S27 | 0.8181 | 0.0169 | 0.0877 | 0.0016 |
| F10V4 | 0.8215 | 0.0088 | 0.0929 | 0.0018 |
| F10S48 | 0.8492 | 0.0221 | 0.1015 | 0.0056 |
| F10S34 | 0.7865 | 0.0175 | 0.1081 | 0.0037 |
| F10S35 | 0.8150 | 0.0073 | 0.1126 | 0.0016 |
| F10S49 | 0.8639 | 0.0128 | 0.1326 | 0.0015 |
| F40S22 | 0.8119 | 0.0042 | 0.1385 | 0.0037 |
| F10S24 | 0.7793 | 0.0127 | 0.1393 | 0.0028 |
| F40S23 | 0.8638 | 0.0056 | 0.1448 | 0.0004 |
| F10S26 | 0.7952 | 0.0124 | 0.1458 | 0.0008 |
| F10S46 | 0.7902 | 0.0052 | 0.1462 | 0.0020 |
| F10S33 | 0.8336 | 0.0115 | 0.1515 | 0.0060 |
| F40S26 | 0.8707 | 0.0214 | 0.1633 | 0.0058 |
| F40V4 | 0.8524 | 0.0109 | 0.1698 | 0.0068 |
| F7V2 | 0.8915 | 0.0086 | 0.1956 | 0.0100 |
| F10S45 | 0.9027 | 0.0093 | 0.2048 | 0.0028 |
| F10S27 | 0.7863 | 0.0073 | 0.2090 | 0.0062 |
| F10S36 | 0.8109 | 0.0038 | 0.2122 | 0.0066 |
| F10V1 | 0.8131 | 0.0050 | 0.2123 | 0.0102 |
| F40S36 | 0.8491 | 0.0093 | 0.2174 | 0.0020 |
| F10S21 | 0.7693 | 0.0003 | 0.2326 | 0.0041 |

[0623] Overall, some of the Cas13f mutants exhibited low collateral effect (e.g., ≤25% collateral effect, or ≥75% mCherry⁺ cells), and high (e.g., EGFP⁺ cells≤25%) to intermediate gRNA-guided cleavage (e.g., 25%≤EGFP⁺ cells≤75%) including: F40S23 ((Y666A,Y677A), SEQ ID NO: 1635) and F40S27, etc (see below table and FIG. 28 and FIG. 29). Based on FACS data (not shown), these mutants have significantly reduced collateral effect compared to wild-type.

[0624] Other mutants/variants retained high gRNA-guided cleavage (e.g., EGFP⁺ cells≤25%), but also exhibited higher than wild-type level collateral activity (e.g., ≤25% mCherry⁺ cells). See tables above. These mutants/variants may be useful for better/more sensitivity detection methods such as SHERLOCK.

The application's sequence listing, which the Patent Office published only in electronic form, follows.

SEQUENCE LISTING (1635 sequences)

SEQ ID NO: 1 - DNA, 720 bp, Artificial Sequence
  source: /note="Description of Artificial Sequence: Synthetic polynucleotide"
atggtgagcaagggcgaggagctgttcaccggggtggtgcccatcctggtcgagctggacggcgacgtaaacggccacaagttcagcgtgtccggcgagggcgagggcgatgccacctacggcaagctgaccctgaagttcatctgcaccaccggcaagctgcccgtgccctggcccaccctcgtgaccaccctgacctacggcgtgcagtgcttcagccgctaccccgaccacatgaagcagcacgacttcttcaagtccgccatgcccgaaggctacgtccaggagcgcaccatcttcttcaaggacgacggcaactacaagacccgcgccgaggtgaagttcgagggcgacaccctggtgaaccgcatcgagctgaagggcatcgacttcaaggaggacggcaacatcctggggcacaagctggagtacaactacaacagccacaacgtctatatcatggccgacaagcagaagaacggcatcaaggtgaacttcaagatccgccacaacatcgaggacggcagcgtgcagctcgccgaccactaccagcagaacacccccatcggcgacggccccgtgctgctgcccgacaaccactacctgagcacccagtccgccctgagcaaagaccccaacgagaagcgcgatcacatggtcctgctggagttcgtgaccgccgccgggatcactctcggcatggacgagctgtacaagtga

SEQ ID NO: 2 - DNA, 711 bp, Artificial Sequence
  source: /note="Description of Artificial Sequence: Synthetic polynucleotide"
atggtgagcaagggcgaggaggataacatggccatcatcaaggagttcatgcgcttcaaggtgcacatggagggctccgtgaacggccacgagttcgagatcgagggcgagggcgagggccgcccctacgagggcacccagaccgccaagctgaaggtgaccaagggtggccccctgcccttcgcctgggacatcctgtcccctcagttcatgtacggctccaaggcctacgtgaagcaccccgccgacatccccgactacttgaagctgtccttccccgagggcttcaagtgggagcgcgtgatgaacttcgatgacggcggcgtggtgaccgtgacccaggactcctccctgcaggacggcgagttcatctacaaggtgaagctgcgcggcaccaacttcccctccgacggccccgtaatgcagaagaaaaccatgggctgggaggcctcctccgagcggatgtaccccgaggacggcgccctgaagggcgagatcaagcagaggctgaagctgaaggacggcggccactacgacgctgaggtcaagaccacctacaaggccaagaagcccgtgcagctgcccggcgcctacaacgtcaacatcaagttggacatcacctcccacaacgaggactacaccatcgtggaacagtacgaacgcgccgagggccgccactccaccggcggcatggacgagctgtacaagtaa

SEQ ID NO: 3 - DNA, 30 bp, Artificial Sequence
  source: /note="Description of Artificial Sequence: Synthetic oligonucleotide"
agcactgcacgccgtaggtcagggtggtca

SEQ ID NO: 4 - protein, 775 aa, Unknown
  source: /note="Description of Unknown: Cas13e seqeunce"
MAQVSKQTSKKRELSIDEYQGARKWCFTIAFNKALVNRDKNDGLFVESLLRHEKYSKHDWYDEDTRALIKCSTQAANAKAEALRNYFSHYRHSPGCLTFTAEDELRTIMERAYERAIFECRRRETEVIIEFPSLFEGDRITTAGVVFFVSFFVERRVLDRLYGAVSGLKKNEGQYKLTRKALSMYCLKDSRFTKAWDKRVLLFRDILAQLGRIPAEAYEYYHGEQGDKKRANDNEGTNPKRHKDKFIEFALHYLEAQHSEICFGRRHIVREEAGAGDEHKKHRTKGKVVVDFSKKDEDQSYYISKNNVIVRIDKNAGPRSYRMGLNELKYLVLLSLQGKGDDAIAKLYRYRQHVENILDVVKVTDKDNHVFLPRFVLEQHGIGRKAFKQRIDGRVKHVRGVWEKKKAATNEMTLHEKARDILQYVNENCTRSFNPGEYNRLLVCLVGKDVENFQAGLKRLQLAERIDGRVYSIFAQTSTINEMHQVVCDQILNRLCRIGDQKLYDYVGLGKKDEIDYKQKVAWFKEHISIRRGFLRKKFWYDSKKGFAKLVEEHLESGGGQRDVGLDKKYYHIDAIGRFEGANPALYETLARDRLCLMMAQYFLGSVRKELGNKIVWSNDSIELPVEGSVGNEKSIVFSVSDYGKLYVLDDAEFLGRICEYFMPHEKGKIRYHTVYEKGFRAYNDLQKKCVEAVLAFEEKVVKAKKMSEKEGAHYIDFREILAQTMCKEAEKTAVNKVRRAFFHHHLKFVIDEFGLFSDVMKKYGIEKEWKFPVK

SEQ ID NO: 5 - DNA, 2328 bp, Artificial Sequence
  source: /note="Description of Artificial Sequence: Synthetic polynucleotide"
atggcccaggtgagcaagcagacctccaagaagagggagctgagcatcgacgagtaccagggcgcccggaagtggtgcttcaccattgccttcaacaaggccctggtgaaccgggacaagaacgacggcctgttcgtggaaagcctgctgagacacgagaagtacagcaagcacgactggtacgacgaagatacccgggccctgatcaagtgcagcacccaggccgccaacgccaaggctgaagccctgcggaactacttcagtcactaccggcatagccctggctgcctgaccttcaccgccgaggacgaactgcggaccatcatggagagagcctatgagcgggccatcttcgagtgcagaagaagagagacagaggtgatcatcgagtttcccagcctgttcgagggcgaccggatcaccaccgccggcgtggtgtttttcgtgagctttttcgtggaaagaagagtgctggatcggctgtatggagccgtgtccggcctgaagaagaatgagggacagtacaagctgacccggaaggccctgagcatgtactgcctgaaggacagcagattcaccaaggcctgggataagcgggtgctgctgttcagagacatcctggcccagctgggaagaatccccgccgaggcctacgagtactaccacggcgagcagggtgataagaagagagctaacgacaatgagggcacaaatcccaagcggcacaaggacaagttcatcgaatttgcactgcactacctggaagcccagcacagcgagatctgcttcggcagacgccacatcgtgcgggaagaggccggcgccggcgatgagcacaagaagcaccggaccaagggaaaggtggtggtggacttcagcaagaaggacgaggaccagagctactatatctccaagaacaacgtgatcgtgcggatcgacaagaacgccggccctagaagctaccggatgggcctgaacgagctgaagtacctcgtgctgctgagcctgcaggggaagggcgacgatgccatcgccaagctgtacagatacagacagcacgtggagaacatcctggatgtggtgaaggtgaccgataaggataaccacgtgttcctgccccgcttcgtgctggagcagcacggcatcggcagaaaggccttcaagcagcggatcgatggacgggtgaagcacgtgcggggcgtgtgggagaagaagaaggccgccaccaatgaaatgaccctgcacgagaaggccagagacatcctgcagtacgtgaacgaaaactgcacccggtccttcaaccctggcgaatacaacagactgctggtgtgcctggtgggcaaggacgtggagaactttcaggccggcctgaagcggctgcagctggccgaaaggatcgatggccgggtgtactccatcttcgcccagaccagcaccatcaatgagatgcaccaggtggtgtgcgaccagatcctgaaccggctgtgcagaatcggcgaccagaagctgtacgattacgtgggactgggcaagaaggacgaaatcgactacaagcagaaggtggcctggttcaaggagcacatcagcatccggagaggattcctgagaaagaagttctggtacgatagcaagaagggattcgcaaagctggtggaggaacacctggagtccggcggcggccagcgcgacgtgggcctggacaagaagtactaccacatcgacgccatcggcagattcgagggcgccaaccccgccctgtacgagaccctggccagagatcggctgtgcctcatgatggcccagtacttcctgggcagcgtgagaaaggaactgggcaacaagattgtgtggagcaacgacagcatcgaactgcctgtggaaggctctgtgggaaatgagaagagcatcgtgttctccgtgtctgactacggcaagctgtacgtgctggacgatgccgaattcctgggccggatctgcgaatacttcatgccccacgaaaagggcaagatccggtaccacacagtgtacgaaaagggctttagagcatacaacgacctgcagaagaagtgcgtggaggccgtgctggctttcgaagagaaggtggtgaaggccaagaagatgagcgagaaggaaggcgcccactacatcgacttccgggagatcctggcccagaccatgtgcaaggaggccgaaaagaccgcagtgaacaaggtgagacgcgccttcttccaccaccacctgaagttcgtgattgacgagttcggcctgttcagcgacgtgatgaagaagtacggcatcgagaaggaatggaagttccctgtcaagtag

SEQ ID NO: 6 - protein, 775 aa, Artificial Sequence
  source: /note="Description of Artificial Sequence: Synthetic polypeptide"
MAQVSKQTSKKRELSIDEYQGARKWCFTIAFNKAVFAAAAAAGLFVASLEDHEKYSKHDWYDEDTRALIKCSTQAANAKAEALRNYFSHYRHSPGCLTFTAEDELRTIMERAYERAIFECRRRETEVIIEFPSLFEGDRITTAGVVFFVSFFVERRVLDRLYGAVSGLKKNEGQYKLTRKALSMYCLKDSRFTKAWDKRVLLFRDILAQLGRIPAEAYEYYHGEQGDKKRANDNEGTNPKRHKDKFIEFALHYLEAQHSEICFGRRHIVREEAGAGDEHKKHRTKGKVVVDFSKKDEDQSYYISKNNVIVRIDKNAGPRSYRMGLNELKYLVLLSLQGKGDDAIAKLYRYRQHVENILDVVKVTDKDNHVFLPRFVLEQHGIGRKAFKQRIDGRVKHVRGVWEKKKAATNEMTLHEKARDILQYVNENCTRSFNPGEYNRLLVCLVGKDVENFQAGLKRLQLAERIDGRVYSIFAQTSTINEMHQVVCDQILNRLCRIGDQKLYDYVGLGKKDEIDYKQKVAWFKEHISIRRGFLRKKFWYDSKKGFAKLVEEHLESGGGQRDVGLDKKYYHIDAIGRFEGANPALYETLARDRLCLMMAQYFLGSVRKELGNKIVWSNDSIELPVEGSVGNEKSIVFSVSDYGKLYVLDDAEFLGRICEYFMPHEKGKIRYHTVYEKGFRAYNDLQKKCVEAVLAFEEKVVKAKKMSEKEGAHYIDFREILAQTMCKEAEKTAVNKVRRAFFHHHLKFVIDEFGLFSDVMKKYGIEKEWKFPVK

SEQ ID NO: 7 - protein, 775 aa, Artificial Sequence
  source: /note="Description of Artificial Sequence: Synthetic polypeptide"
MAQVSKQTSKKRELSIDEYQGARKWCFTIAFNKALVNRDKNDGLFVESLLRVFAYSAAAWYAAATEDLIKCSTQAANAKAEALRNYFSHYRHSPGCLTFTAEDELRTIMERAYERAIFECRRRETEVIIEFPSLFEGDRITTAGVVFFVSFFVERRVLDRLYGAVSGLKKNEGQYKLTRKALSMYCLKDSRFTKAWDKRVLLFRDILAQLGRIPAEAYEYYHGEQGDKKRANDNEGTNPKRHKDKFIEFALHYLEAQHSEICFGRRHIVREEAGAGDEHKKHRTKGKVVVDFSKKDEDQSYYISKNNVIVRIDKNAGPRSYRMGLNELKYLVLLSLQGKGDDAIAKLYRYRQHVENILDVVKVTDKDNHVFLPRFVLEQHGIGRKAFKQRIDGRVKHVRGVWEKKKAATNEMTLHEKARDILQYVNENCTRSFNPGEYNRLLVCLVGKDVENFQAGLKRLQLAERIDGRVYSIFAQTSTINEMHQVVCDQILNRLCRIGDQKLYDYVGLGKKDEIDYKQKVAWFKEHISIRRGFLRKKFWYDSKKGFAKLVEEHLESGGGQRDVGLDKKYYHIDAIGRFEGANPALYETLARDRLCLMMAQYFLGSVRKELGNKIVWSNDSIELPVEGSVGNEKSIVFSVSDYGKLYVLDDAEFLGRICEYFMPHEKGKIRYHTVYEKGFRAYNDLQKKCVEAVLAFEEKVVKAKKMSEKEGAHYIDFREILAQTMCKEAEKTAVNKVRRAFFHHHLKFVIDEFGLFSDVMKKYGIEKEWKFPVK

SEQ ID NO: 8 - protein, 775 aa, Artificial Sequence
  source: /note="Description of Artificial Sequence: Synthetic polypeptide"
MAQVSKQTSKKRELSIDEYQGARKWCFTIAFNKALVNRDKNDGLFVESLLRHEKYSKHDWYDEDTRALIKCSTQAANAKAEALRNYFSHYRHSPGCLTFTAEDELRTIMERAYERAIFECRRRETEVIIEFPSLFEGDRITTAGVVFFVSFFVERVFLAALAGAVAGLAEDEGQYKLTRKALSMYCLKDSRFTKAWDKRVLLFRDILAQLGRIPAEAYEYYHGEQGDKKRANDNEGTNPKRHKDKFIEFALHYLEAQHSEICFGRRHIVREEAGAGDEHKKHRTKGKVVVDFSKKDEDQSYYISKNNVIVRIDKNAGPRSYRMGLNELKYLVLLSLQGKGDDAIAKLYRYRQHVENILDVVKVTDKDNHVFLPRFVLEQHGIGRKAFKQRIDGRVKHVRGVWEKKKAATNEMTLHEKARDILQYVNENCTRSFNPGEYNRLLVCLVGKDVENFQAGLKRLQLAERIDGRVYSIFAQTSTINEMHQVVCDQILNRLCRIGDQKLYDYVGLGKKDEIDYKQKVAWFKEHISIRRGFLRKKFWYDSKKGFAKLVEEHLESGGGQRDVGLDKKYYHIDAIGRFEGANPALYETLARDRLCLMMAQYFLGSVRKELGNKIVWSNDSIELPVEGSVGNEKSIVFSVSDYGKLYVLDDAEFLGRICEYFMPHEKGKIRYHTVYEKGFRAYNDLQKKCVEAVLAFEEKVVKAKKMSEKEGAHYIDFREILAQTMCKEAEKTAVNKVRRAFFHHHLKFVIDEFGLFSDVMKKYGIEKEWKFPVK

SEQ ID NO: 9 - protein, 775 aa, Artificial Sequence
  source: /note="Description of Artificial Sequence: Synthetic polypeptide"
MAQVSKQTSKKRELSIDEYQGARKWCFTIAFNKALVNRDKNDGLFVESLLRHEKYSKHDWYDEDTRALIKCSTQAANAKAEALRNYFSHYRHSPGCLTFTAEDELRTIMERAYERAIFECRRRETEVIIEFPSLFEGDRITTAGVVFFVSFFVERRVLDRLYGAVSGLKKNEGQYKLTRKALSMYCLKDSRFTKAWDKRVLLFRDILAQLGRIPAEAYEYYHGEQGDKKRANDNEGTNPKRHKDKFIEFALHYLEAQHSEICFGRRHIVREEAGAGDEHKKHRTKGKVVVDFSKKDEDQSYYISKNNVIVRIDKNAGPRSYRMGLNELKYLVLLSLQGKGDDAIAKLYRYRQHVENILDVVKVTDKDNHVFLPRFVLEQHGIGRKAFKQRIDGRVKHVRGVWEKKKAATNEMTLHEKARDILQYVNENCTRSFNPGEYNRLLVCLVGKDVENFQAGLKRLQLAERIDGRVYSIFAQTSTINEMHQVVCDQILNRLCRIGDQKLYDYVGLGKKDEIDYKQKVAWFKEHISIRRGFLRKKFWYDSKKGFAKLVEEHLESGGGQRDVGLDKKYYHIDAIGRFEGANPALYETLARDRLCLMMAQYFLGSVRKELGNKIVWSNDSIELPVEGSVGNEKSIVFSVSDYGKLYVLDDAEFLGRICEYFMPHVFGAIAAATVYAAGEDAYNDLQKKCVEAVLAFEEKVVKAKKMSEKEGAHYIDFREILAQTMCKEAEKTAVNKVRRAFFHHHLKFVIDEFGLFSDVMKKYGIEKEWKFPVK

SEQ ID NO: 10 - protein, 775 aa, Artificial Sequence
  source: /note="Description of Artificial Sequence: Synthetic polypeptide"
MAQVSKQTSKKRELSIDEYQGARKWCFTIAFNKALVNRDKNDGLFVESLLRHEKYSKHDWYDEDTRALIKCSTQAANAKAEALRNYFSHYRHSPGCLTFTAEDELRTIMERAYERAIFECRRRETEVIIEFPSLFEGDRITTAGVVFFVSFFVERRVLDRLYGAVSGLKKNEGQYKLTRKALSMYCLKDSRFTKAWDKRVLLFRDILAQLGRIPAEAYEYYHGEQGDKKRANDNEGTNPKRHKDKFIEFALHYLEAQHSEICFGRRHIVREEAGAGDEHKKHRTKGKVVVDFSKKDEDQSYYISKNNVIVRIDKNAGPRSYRMGLNELKYLVLLSLQGKGDDAIAKLYRYRQHVENILDVVKVTDKDNHVFLPRFVLEQHGIGRKAFKQRIDGRVKHVRGVWEKKKAATNEMTLHEKARDILQYVNENCTRSFNPGEYNRLLVCLVGKDVENFQAGLKRLQLAERIDGRVYSIFAQTSTINEMHQVVCDQILNRLCRIGDQKLYDYVGLGKKDEIDYKQKVAWFKEHISIRRGFLRKKFWYDSKKGFAKLVEEHLESGGGQRDVGLDKKYYHIDAIGRFEGANPALYETLARDRLCLMMAQYFLGSVRKELGNKIVWSNDSIELPVEGSVGNEKSIVFSVSDYGKLYVLDDAEFLGRICEYFMPHEKGKIRYHTVYEKGFRAYNDLQKKCVEAVLAFEEKVVKAKKMSEKEVFAAIAFAAILAQAEDKEAEKTAVNKVRRAFFHHHLKFVIDEFGLFSDVMKKYGIEKEWKFPVK

SEQ ID NO: 11 - DNA, 2328 bp, Artificial Sequence
  source: /note="Description of Artificial Sequence: Synthetic polynucleotide"
atggcccaggtgagcaagcagacctccaagaagagggagctgagcatcgacgagtaccagggcgcccggaagtggtgcttcaccattgccttcaacaaggccgtcttcgccgccgccgccgccgccggcctgttcgtggccagcctggaagaccacgagaagtacagcaagcacgactggtacgacgaagatacccgggccctgatcaagtgcagcacccaggccgccaacgccaaggctgaagccctgcggaactacttcagtcactaccggcatagccctggctgcctgaccttcaccgccgaggacgaactgcggaccatcatggagagagcctatgagcgggccatcttcgagtgcagaagaagagagacagaggtgatcatcgagtttcccagcctgttcgagggcgaccggatcaccaccgccggcgtggtgtttttcgtgagctttttcgtggaaagaagagtgctggatcggctgtatggagccgtgtccggcctgaagaagaatgagggacagtacaagctgacccggaaggccctgagcatgtactgcctgaaggacagcagattcaccaaggcctgggataagcgggtgctgctgttcagagacatcctggcccagctgggaagaatccccgccgaggcctacgagtactaccacggcgagcagggtgataagaagagagctaacgacaatgagggcacaaatcccaagcggcacaaggacaagttcatcgaatttgcactgcactacctggaagcccagcacagcgagatctgcttcggcagacgccacatcgtgcgggaagaggccggcgccggcgatgagcacaagaagcaccggaccaagggaaaggtggtggtggacttcagcaagaaggacgaggaccagagctactatatctccaagaacaacgtgatcgtgcggatcgacaagaacgccggccctagaagctaccggatgggcctgaacgagctgaagtacctcgtgctgctgagcctgcaggggaagggcgacgatgccatcgccaagctgtacagatacagacagcacgtggagaacatcctggatgtggtgaaggtgaccgataaggataaccacgtgttcctgccccgcttcgtgctggagcagcacggcatcggcagaaaggccttcaagcagcggatcgatggacgggtgaagcacgtgcggggcgtgtgggagaagaagaaggccgccaccaatgaaatgaccctgcacgagaaggccagagacatcctgcagtacgtgaacgaaaactgcacccggtccttcaaccctggcgaatacaacagactgctggtgtgcctggtgggcaaggacgtggagaactttcaggccggcctgaagcggctgcagctggccgaaaggatcgatggccgggtgtactccatcttcgcccagaccagcaccatcaatgagatgcaccaggtggtgtgcgaccagatcctgaaccggctgtgcagaatcggcgaccagaagctgtacgattacgtgggactgggcaagaaggacgaaatcgactacaagcagaaggtggcctggttcaaggagcacatcagcatccggagaggattcctgagaaagaagttctggtacgatagcaagaagggattcgcaaagctggtggaggaacacctggagtccggcggcggccagcgcgacgtgggcctggacaagaagtactaccacatcgacgccatcggcagattcgagggcgccaaccccgccctgtacgagaccctggccagagatcggctgtgcctcatgatggcccagtacttcctgggcagcgtgagaaaggaactgggcaacaagattgtgtggagcaacgacagcatcgaactgcctgtggaaggctctgtgggaaatgagaagagcatcgtgttctccgtgtctgactacggcaagctgtacgtgctggacgatgccgaattcctgggccggatctgcgaatacttcatgccccacgaaaagggcaagatccggtaccacacagtgtacgaaaagggctttagagcatacaacgacctgcagaagaagtgcgtggaggccgtgctggctttcgaagagaaggtggtgaaggccaagaagatgagcgagaaggaaggcgcccactacatcgacttccgggagatcctggcccagaccatgtgcaaggaggccgaaaagaccgcagtgaacaaggtgagacgcgccttcttccaccaccacctgaagttcgtgattgacgagttcggcctgttcagcgacgtgatgaagaagtacggcatcgagaaggaatggaagttccctgtcaagtag

SEQ ID NO: 12 - DNA, 2328 bp, Artificial Sequence
  source: /note="Description of Artificial Sequence: Synthetic polynucleotide"
atggcccaggtgagcaagcagacctccaagaagagggagctgagcatcgacgagtaccagggcgcccggaagtggtgcttcaccattgccttcaacaaggccctggtgaaccgggacaagaacgacggcctgttcgtggaaagcctgctgagagtcttcgcctacagcgccgccgcctggtacgccgccgccaccgaagacctgatcaagtgcagcacccaggccgccaacgccaaggctgaagccctgcggaactacttcagtcactaccggcatagccctggctgcctgaccttcaccgccgaggacgaactgcggaccatcatggagagagcctatgagcgggccatcttcgagtgcagaagaagagagacagaggtgatcatcgagtttcccagcctgttcgagggcgaccggatcaccaccgccggcgtggtgtttttcgtgagctttttcgtggaaagaagagtgctggatcggctgtatggagccgtgtccggcctgaagaagaatgagggacagtacaagctgacccggaaggccctgagcatgtactgcctgaaggacagcagattcaccaaggcctgggataagcgggtgctgctgttcagagacatcctggcccagctgggaagaatccccgccgaggcctacgagtactaccacggcgagcagggtgataagaagagagctaacgacaatgagggcacaaatcccaagcggcacaaggacaagttcatcgaatttgcactgcactacctggaagcccagcacagcgagatctgcttcggcagacgccacatcgtgcgggaagaggccggcgccggcgatgagcacaagaagcaccggaccaagggaaaggtggtggtggacttcagcaagaaggacgaggaccagagctactatatctccaagaacaacgtgatcgtgcggatcgacaagaacgccggccctagaagctaccggatgggcctgaacgagctgaagtacctcgtgctgctgagcctgcaggggaagggcgacgatgccatcgccaagctgtacagatacagacagcacgtggagaacatcctggatgtggtgaaggtgaccgataaggataaccacgtgttcctgccccgcttcgtgctggagcagcacggcatcggcagaaaggccttcaagcagcggatcgatggacgggtgaagcacgtgcggggcgtgtgggagaagaagaaggccgccaccaatgaaatgaccctgcacgagaaggccagagacatcctgcagtacgtgaacgaaaactgcacccggtccttcaaccctggcgaatacaacagactgctggtgtgcctggtgggcaaggacgtggagaactttcaggccggcctgaagcggctgcagctggccgaaaggatcgatggccgggtgtactccatcttcgcccagaccagcaccatcaatgagatgcaccaggtggtgtgcgaccagatcctgaaccggctgtgcagaatcggcgaccagaagctgtacgattacgtgggactgggcaagaaggacgaaatcgactacaagcagaaggtggcctggttcaaggagcacatcagcatccggagaggattcctgagaaagaagttctggtacgatagcaagaagggattcgcaaagctggtggaggaacacctggagtccggcggcggccagcgcgacgtgggcctggacaagaagtactaccacatcgacgccatcggcagattcgagggcgccaaccccgccctgtacgagaccctggccagagatcggctgtgcctcatgatggcccagtacttcctgggcagcgtgagaaaggaactgggcaacaagattgtgtggagcaacgacagcatcgaactgcctgtggaaggctctgtgggaaatgagaagagcatcgtgttctccgtgtctgactacggcaagctgtacgtgctggacgatgccgaattcctgggccggatctgcgaatacttcatgccccacgaaaagggcaagatccggtaccacacagtgtacgaaaagggctttagagcatacaacgacctgcagaagaagtgcgtggaggccgtgctggctttcgaagagaaggtggtgaaggccaagaagatgagcgagaaggaaggcgcccactacatcgacttccgggagatcctggcccagaccatgtgcaaggaggccgaaaagaccgcagtgaacaaggtgagacgcgccttcttccaccaccacctgaagttcgtgattgacgagttcggcctgttcagcgacgtgatgaagaagtacggcatcgagaaggaatggaagttccctgtcaagtag

SEQ ID NO: 13 - DNA, 2328 bp, Artificial Sequence
  source: /note="Description of Artificial Sequence: Synthetic polynucleotide"
atggcccaggtgagcaagcagacctccaagaagagggagctgagcatcgacgagtaccagggcgcccggaagtggtgcttcaccattgccttcaacaaggccctggtgaaccgggacaagaacgacggcctgttcgtggaaagcctgctgagacacgagaagtacagcaagcacgactggtacgacgaagatacccgggccctgatcaagtgcagcacccaggccgccaacgccaaggctgaagccctgcggaactacttcagtcactaccggcatagccctggctgcctgaccttcaccgccgaggacgaactgcggaccatcatggagagagcctatgagcgggccatcttcgagtgcagaagaagagagacagaggtgatcatcgagtttcccagcctgttcgagggcgaccggatcaccaccgccggcgtggtgtttttcgtgagctttttcgtggaaagagtcttcctggccgccctggccggagccgtggccggcctggccgaagacgagggacagtacaagctgacccggaaggccctgagcatgtactgcctgaaggacagcagattcaccaaggcctgggataagcgggtgctgctgttcagagacatcctggcccagctgggaagaatccccgccgaggcctacgagtactaccacggcgagcagggtgataagaagagagctaacgacaatgagggcacaaatcccaagcggcacaaggacaagttcatcgaatttgcactgcactacctggaagcccagcacagcgagatctgcttcggcagacgccacatcgtgcgggaagaggccggcgccggcgatgagcacaagaagcaccggaccaagggaaaggtggtggtggacttcagcaagaaggacgaggaccagagctactatatctccaagaacaacgtgatcgtgcggatcgacaagaacgccggccctagaagctaccggatgggcctgaacgagctgaagtacctcgtgctgctgagcctgcaggggaagggcgacgatgccatcgccaagctgtacagatacagacagcacgtggagaacatcctggatgtggtgaaggtgaccgataaggataaccacgtgttcctgccccgcttcgtgctggagcagcacggcatcggcagaaaggccttcaagcagcggatcgatggacgggtgaagcacgtgcggggcgtgtgggagaagaagaaggccgccaccaatgaaatgaccctgcacgagaaggccagagacatcctgcagtacgtgaacgaaaactgcacccggtccttcaaccctggcgaatacaacagactgctggtgtgcctggtgggcaaggacgtggagaactttcaggccggcctgaagcggctgcagctggccgaaaggatcgatggccgggtgtactccatcttcgcccagaccagcaccatcaatgagatgcaccaggtggtgtgcgaccagatcctgaaccggctgtgcagaatcggcgaccagaagctgtacgattacgtgggactgggcaagaaggacgaaatcgactacaagcagaaggtggcctggttcaaggagcacatcagcatccggagaggattcctgagaaagaagttctggtacgatagcaagaagggattcgcaaagctggtggaggaacacctggagtccggcggcggccagcgcgacgtgggcctggacaagaagtactaccacatcgacgccatcggcagattcgagggcgccaaccccgccctgtacgagaccctggccagagatcggctgtgcctcatgatggcccagtacttcctgggcagcgtgagaaaggaactgggcaacaagattgtgtggagcaacgacagcatcgaactgcctgtggaaggctctgtgggaaatgagaagagcatcgtgttctccgtgtctgactacggcaagctgtacgtgctggacgatgccgaattcctgggccggatctgcgaatacttcatgccccacgaaaagggcaagatccggtaccacacagtgtacgaaaagggctttagagcatacaacgacctgcagaagaagtgcgtggaggccgtgctggctttcgaagagaaggtggtgaaggccaagaagatgagcgagaaggaaggcgcccactacatcgacttccgggagatcctggcccagaccatgtgcaaggaggccgaaaagaccgcagtgaacaaggtgagacgcgccttcttccaccaccacctgaagttcgtgattgacgagttcggcctgttcagcgacgtgatgaagaagtacggcatcgagaaggaatggaagttccctgtcaagtag

SEQ ID NO: 14 - DNA, 2328 bp, Artificial Sequence
  source: /note="Description of Artificial Sequence: Synthetic polynucleotide"
atggcccaggtgagcaagcagacctccaagaagagggagctgagcatcgacgagtaccagggcgcccggaagtggtgcttcaccattgccttcaacaaggccctggtgaaccgggacaagaacgacggcctgttcgtggaaagcctgctgagacacgagaagtacagcaagcacgactggtacgacgaagatacccgggccctgatcaagtgcagcacccaggccgccaacgccaaggctgaagccctgcggaactacttcagtcactaccggcatagccctggctgcctgaccttcaccgccgaggacgaactgcggaccatcatggagagagcctatgagcgggccatcttcgagtgcagaagaagagagacagaggtgatcatcgagtttcccagcctgttcgagggcgaccggatcaccaccgccggcgtggtgtttttcgtgagctttttcgtggaaagaagagtgctggatcggctgtatggagccgtgtccggcctgaagaagaatgagggacagtacaagctgacccggaaggccctgagcatgtactgcctgaaggacagcagattcaccaaggcctgggataagcgggtgctgctgttcagagacatcctggcccagctgggaagaatccccgccgaggcctacgagtactaccacggcgagcagggtgataagaagagagctaacgacaatgagggcacaaatcccaagcggcacaaggacaagttcatcgaatttgcactgcactacctggaagcccagcacagcgagatctgcttcggcagacgccacatcgtgcgggaagaggccggcgccggcgatgagcacaagaagcaccggaccaagggaaaggtggtggtggacttcagcaagaaggacgaggaccagagctactatatctccaagaacaacgtgatcgtgcggatcgacaagaacgccggccctagaagctaccggatgggcctgaacgagctgaagtacctcgtgctgctgagcctgcaggggaagggcgacgatgccatcgccaagctgtacagatacagacagcacgtggagaacatcctggatgtggtgaaggtgaccgataaggataaccacgtgttcctgccccgcttcgtgctggagcagcacggcatcggcagaaaggccttcaagcagcggatcgatggacgggtgaagcacgtgcggggcgtgtgggagaagaagaaggccgccaccaatgaaatgaccctgcacgagaaggccagagacatcctgcagtacgtgaacgaaaactgcacccggtccttcaaccctggcgaatacaacagactgctggtgtgcctggtgggcaaggacgtggagaactttcaggccggcctgaagcggctgcagctggccgaaaggatcgatggccgggtgtactccatcttcgcccagaccagcaccatcaatgagatgcaccaggtggtgtgcgaccagatcctgaaccggctgtgcagaatcggcgaccagaagctgtacgattacgtgggactgggcaagaaggacgaaatcgactacaagcagaaggtggcctggttcaaggagcacatcagcatccggagaggattcctgagaaagaagttctggtacgatagcaagaagggattcgcaaagctggtggaggaacacctggagtccggcggcggccagcgcgacgtgggcctggacaagaagtactaccacatcgacgccatcggcagattcgagggcgccaaccccgccctgtacgagaccctggccagagatcggctgtgcctcatgatggcccagtacttcctgggcagcgtgagaaaggaactgggcaacaagattgtgtggagcaacgacagcatcgaactgcctgtggaaggctctgtgggaaatgagaagagcatcgtgttctccgtgtctgactacggcaagctgtacgtgctggacgatgccgaattcctgggccggatctgcgaatacttcatgccccacgtcttcggcgccatcgccgccgccacagtgtacgccgccggcgaagacgcatacaacgacctgcagaagaagtgcgtggaggccgtgctggctttcgaagagaaggtggtgaaggccaagaagatgagcgagaaggaaggcgcccactacatcgacttccgggagatcctggcccagaccatgtgcaaggaggccgaaaagaccgcagtgaacaaggtgagacgcgccttcttccaccaccacctgaagttcgtgattgacgagttcggcctgttcagcgacgtgatgaagaagtacggcatcgagaaggaatggaagttccctgtcaagtag

SEQ ID NO: 15 - DNA, 2328 bp, Artificial Sequence
  source: /note="Description of Artificial Sequence: Synthetic polynucleotide"
atggcccaggtgagcaagcagacctccaagaagagggagctgagcatcgacgagtaccagggcgcccggaagtggtgcttcaccattgccttcaacaaggccctggtgaaccgggacaagaacgacggcctgttcgtggaaagcctgctgagacacgagaagtacagcaagcacgactggtacgacgaagatacccgggccctgatcaagtgcagcacccaggccgccaacgccaaggctgaagccctgcggaactacttcagtcactaccggcatagccctggctgcctgaccttcaccgccgaggacgaactgcggaccatcatggagagagcctatgagcgggccatcttcgagtgcagaagaagagagacagaggtgatcatcgagtttcccagcctgttcgagggcgaccggatcaccaccgccggcgtggtgtttttcgtgagctttttcgtggaaagaagagtgctggatcggctgtatggagccgtgtccggcctgaagaagaatgagggacagtacaagctgacccggaaggccctgagcatgtactgcctgaaggacagcagattcaccaaggcctgggataagcgggtgctgctgttcagagacatcctggcccagctgggaagaatccccgccgaggcctacgagtactaccacggcgagcagggtgataagaagagagctaacgacaatgagggcacaaatcccaagcggcacaaggacaagttcatcgaatttgcactgcactacctggaagcccagcacagcgagatctgcttcggcagacgccacatcgtgcgggaagaggccggcgccggcgatgagcacaagaagcaccggaccaagggaaaggtggtggtggacttcagcaagaaggacgaggaccagagctactatatctccaagaacaacgtgatcgtgcggatcgacaagaacgccggccctagaagctaccggatgggcctgaacgagctgaagtacctcgtgctgctgagcctgcaggggaagggcgacgatgccatcgccaagctgtacagatacagacagcacgtggagaacatcctggatgtggtgaaggtgaccgataaggataaccacgtgttcctgccccgcttcgtgctggagcagcacggcatcggcagaaaggccttcaagcagcggatcgatggacgggtgaagcacgtgcggggcgtgtgggagaagaagaaggccgccaccaatgaaatgaccctgcacgagaaggccagagacatcctgcagtacgtgaacgaaaactgcacccggtccttcaaccctggcgaatacaacagactgctggtgtgcctggtgggcaaggacgtggagaactttcaggccggcctgaagcggctgcagctggccgaaaggatcgatggccgggtgtactccatcttcgcccagaccagcaccatcaatgagatgcaccaggtggtgtgcgaccagatcctgaaccggctgtgcagaatcggcgaccagaagctgtacgattacgtgggactgggcaagaaggacgaaatcgactacaagcagaaggtggcctggttcaaggagcacatcagcatccggagaggattcctgagaaagaagttctggtacgatagcaagaagggattcgcaaagctggtggaggaacacctggagtccggcggcggccagcgcgacgtgggcctggacaagaagtactaccacatcgacgccatcggcagattcgagggcgccaaccccgccctgtacgagaccctggccagagatcggctgtgcctcatgatggcccagtacttcctgggcagcgtgagaaaggaactgggcaacaagattgtgtggagcaacgacagcatcgaactgcctgtggaaggctctgtgggaaatgagaagagcatcgtgttctccgtgtctgactacggcaagctgtacgtgctggacgatgccgaattcctgggccggatctgcgaatacttcatgccccacgaaaagggcaagatccggtaccacacagtgtacgaaaagggctttagagcatacaacgacctgcagaagaagtgcgtggaggccgtgctggctttcgaagagaaggtggtgaaggccaagaagatgagcgagaaggaagtcttcgccgccatcgccttcgccgccatcctggcccaggccgaagacaaggaggccgaaaagaccgcagtgaacaaggtgagacgcgccttcttccaccaccacctgaagttcgtgattgacgagttcggcctgttcagcgacgtgatgaagaagtacggcatcgagaaggaatggaagttccctgtcaagtag

SEQ ID NO: 16 - protein, 17 aa, Unknown
  source: /note="Description of Unknown: Cas13e seqeunce"
LVNRDKNDGLFVESLLR

SEQ ID NO: 17 - protein, 17 aa, Artificial Sequence
  source: /note="Description of Artificial Sequence: Synthetic peptide"
VFAAAAAAGLFVASLED

SEQ ID NO: 18 - DNA, 51 bp, Unknown
  source: /note="Description of Unknown: Cas13e seqeunce"
ctggtgaaccgggacaagaacgacggcctgttcgtggaaagcctgctgaga

SEQ ID NO: 19 - DNA, 51 bp, Artificial Sequence
  source: /note="Description of Artificial Sequence: Synthetic oligonucleotide"
gtcttcgccgccgccgccgccgccggcctgttcgtggccagcctggaagac

SEQ ID NO: 20 - protein, 16 aa, Unknown
  source: /note="Description of Unknown: Cas13e seqeunce"
HEKYSKHDWYDEDTRA

SEQ ID NO: 21 - protein, 16 aa, Artificial Sequence
  source: /note="Description of Artificial Sequence: Synthetic peptide"
VFAYSAAAWYAAATED

SEQ ID NO: 22 - DNA, 48 bp, Unknown
  source: /note="Description of Unknown: Cas13e seqeunce"
cacgagaagtacagcaagcacgactggtacgacgaagatacccgggcc

SEQ ID NO: 23 - DNA, 48 bp, Artificial Sequence
  source: /note="Description of Artificial Sequence: Synthetic oligonucleotide"
gtcttcgcctacagcgccgccgcctggtacgccgccgccaccgaagac

SEQ ID NO: 24 - protein, 16 aa, Unknown
  source: /note="Description of Unknown: Cas13e seqeunce"
RVLDRLYGAVSGLKKN

SEQ ID NO: 25 - protein, 16 aa, Artificial Sequence
  source: /note="Description of Artificial Sequence: Synthetic peptide"
VFLAALAGAVAGLAED

SEQ ID NO: 26 - DNA, 48 bp, Unknown
  source: /note="Description of Unknown: Cas13e seqeunce"
agagtgctggatcggctgtatggagccgtgtccggcctgaagaagaat

SEQ ID NO: 27 - DNA, 48 bp, Artificial Sequence
  source: /note="Description of Artificial Sequence: Synthetic oligonucleotide"
gtcttcctggccgccctggccggagccgtggccggcctggccgaagac

SEQ ID NO: 28 - protein, 16 aa, Unknown
  source: /note="Description of Unknown: Cas13e seqeunce"
EKGKIRYHTVYEKGFR

SEQ ID NO: 29 - protein, 16 aa, Artificial Sequence
  source: /note="Description of Artificial Sequence: Synthetic peptide"
VFGAIAAATVYAAGED

SEQ ID NO: 30 - DNA, 48 bp, Unknown
  source: /note="Description of Unknown: Cas13e seqeunce"
gaaaagggcaagatccggtaccacacagtgtacgaaaagggctttaga

SEQ ID NO: 31 - DNA, 48 bp, Artificial Sequence
  source: /note="Description of Artificial Sequence: Synthetic oligonucleotide"
gtcttcggcgccatcgccgccgccacagtgtacgccgccggcgaagac

SEQ ID NO: 32 - protein, 16 aa, Unknown
  source: /note="Description of Unknown: Cas13e seqeunce"
GAHYIDFREILAQTMC

SEQ ID NO: 33 - protein, 16 aa, Artificial Sequence
  source: /note="Description of Artificial Sequence: Synthetic peptide"
VFAAIAFAAILAQAED

SEQ ID NO: 34 - DNA, 48 bp, Unknown
  source: /note="Description of Unknown: Cas13e seqeunce"
ggcgcccactacatcgacttccgggagatcctggcccagaccatgtgc

SEQ ID NO: 35 - DNA, 48 bp, Artificial Sequence
  source: /note="Description of Artificial Sequence: Synthetic oligonucleotide"
gtcttcgccgccatcgccttcgccgccatcctggcccaggccgaagac

SEQ ID NO: 36 - protein, 16 aa, Artificial Sequence
  source: /note="Description of Artificial Sequence: Synthetic peptide"
AKGKIRYHTVYAKGFR

SEQ ID NO: 37 - protein, 16 aa, Artificial Sequence
  source: /note="Description of Artificial Sequence: Synthetic peptide"
EKGKIRAHTVAEKGAR

SEQ ID NO: 38 - protein, 16 aa, Artificial Sequence
  source: /note="Description of Artificial Sequence: Synthetic peptide"
EKGKIRAHTVYEKGFR

SEQ ID NO: 39 - protein, 16 aa, Artificial Sequence
  source: /note="Description of Artificial Sequence: Synthetic peptide"
EKGKIRYHTVAEKGFR

SEQ ID NO: 40 - protein, 16 aa, Artificial Sequence
  source: /note="Description of Artificial Sequence: Synthetic peptide"
EKGKIRYHTVYEKGAR

SEQ ID NO: 41 - protein, 16 aa, Artificial Sequence
  source: /note="Description of Artificial Sequence: Synthetic peptide"
EKAKIRYHTVYEKAFR

SEQ ID NO: 42 - protein, 16 aa, Artificial Sequence
  source: /note="Description of Artificial Sequence: Synthetic peptide"
EKGKARYHTVYEKGFR

SEQ ID NO: 43 - protein, 16 aa, Artificial Sequence
  source: /note="Description of Artificial Sequence: Synthetic peptide"
EKGKIRYHAVYEKGFR

SEQ ID NO: 44 - protein, 16 aa, Artificial Sequence
  source: /note="Description of Artificial Sequence: Synthetic peptide"
GAAYIDFREILAQTMC

SEQ ID NO: 45 - protein, 16 aa, Artificial Sequence
  source: /note="Description of Artificial Sequence: Synthetic peptide"
GAHAIDFREILAQTMC

SEQ ID NO: 46 - protein, 16 aa, Artificial Sequence
  source: /note="Description of Artificial Sequence: Synthetic peptide"
GAHYIDFAEILAQTMC

SEQ ID NO: 47 - protein, 16 aa, Artificial Sequence
  source: /note="Description of Artificial Sequence: Synthetic peptide"
GAHYIAFRAILAQTMC

SEQ ID NO: 48 - protein, 16 aa, Artificial Sequence
  source: /note="Description of Artificial Sequence: Synthetic peptide"
AAHYADFREALAQAMA

SEQ ID NO: 49 - protein, 16 aa, Artificial Sequence
  source: /note="Description of Artificial Sequence: Synthetic peptide"
GAHYIDAREIAAATAC

SEQ ID NO: 50 - protein, 775 aa, Unknown; identical to SEQ ID NO: 4
  source: /note="Description of Unknown: Cas13e.1 sequence"

SEQ ID NO: 51 - protein, 805 aa, Unknown
  source: /note="Description of Unknown: Cas13e.2 sequence"
MKVENIKEKSKKAMYLINHYEGPKKWCFAIVLNRACDNYEDNPHLFSKSLLEFEKTSRKDWFDEETRELVEQADTEIQPNPNLKPNTTANRKLKDIRNYFSHHYHKNECLYFKNDDPIRCIMEAAYEKSKIYIKGKQIEQSDIPLPELFESSGWITPAGILLLASFFVERGILHRLMGNIGGFKDNRGEYGLTHDIFTTYCLKGSYSIRAQDHDAVMFRDILGYLSRVPTESFQRIKQPQIRKEGQLSERKTDKFITFALNYLEDYGLKDLEGCKACFARSKIVREQENVESINDKEYKPHENKKKVEIHFDQSKEDRFYINRNNVILKIQKKDGHSNIVRMGVYELKYLVLMSLVGKAKEAVEKIDNYIQDLRDQLPYIEGKNKEEIKEYVRFFPRFIRSHLGLLQINDEEKIKARLDYVKTKWLDKKEKSKELELHKKGRDILRYINERCDRELNRNVYNRILELLVSKDLTGFYRELEELKRTRRIDKNIVQNLSGQKTINALHEKVCDLVLKEIESLDTENLRKYLGLIPKEEKEVTFKEKVDRILKQPVIYKGFLRYQFFKDDKKSFVLLVEDALKEKGGGCDVPLGKEYYKIVSLDKYDKENKTLCETLAMDRLCLMMARQYYLSLNAKLAQEAQQIEWKKEDSIELIIFTLKNPDQSKQSFSIRFSVRDFTKLYVTDDPEFLARLCSYFFPVEKEIEYHKLYSEGINKYTNLQKEGIEAILELEKKLIERNRIQSAKNYLSFNEIMNKSGYNKDEQDDLKKVRNSLLHYKLIFEKEHLKKFYEVMRGEGIEKKWSLIV

SEQ ID NO: 52 - protein, 790 aa, Unknown
  source: /note="Description of Unknown: Cas13f.1 sequence"
MNGIELKKEEAAFYFNQAELNLKAIEDNIFDKERRKTLLNNPQILAKMENFIFNFRDVTKNAKGEIDCLLLKLRELRNFYSHYVHKRDVRELSKGEKPILEKYYQFAIESTGSENVKLEIIENDAWLADAGVLFFLCIFLKKSQANKLISGISGFKRNDDTGQPRRNLFTYFSIREGYKVVPEMQKHFLLFSLVNHLSNQDDYIEKAHQPYDIGEGLFFHRIASTFLNISGILRNMKFYTYQSKRLVEQRGELKREKDIFAWEEPFQGNSYFEINGHKGVIGEDELKELCYAFLIGNQDANKVEGRITQFLEKFRNANSVQQVKDDEMLKPEYFPANYFAESGVGRIKDRVLNRLNKAIKSNKAKKGEIIAYDKMREVMAFINNSLPVDEKLKPKDYKRYLGMVRFWDREKDNIKREFETKEWSKYLPSNFWTAKNLERVYGLAREKNAELFNKLKADVEKMDERELEKYQKINDAKDLANLRRLASDFGVKWEEKDWDEYSGQIKKQITDSQKLTIMKQRITAGLKKKHGIENLNLRITIDINKSRKAVLNRIAIPRGFVKRHILGWQESEKVSKKIREAECEILLSKEYEELSKQFFQSKDYDKMTRINGLYEKNKLIALMAVYLMGQLRILFKEHTKLDDITKTTVDFKISDKVTVKIPFSNYPSLVYTMSSKYVDNIGNYGFSNKDKDKPILGKIDVIEKQRMEFIKEVLGFEKYLFDDKIIDKSKFADTATHISFAEIVEELVEKGWDKDRLTKLKDARNKALHGEILTGTSFDETKSLINELKK

SEQ ID NO: 53 - protein, 792 aa, Unknown
  source: /note="Description of Unknown: Cas13f.2 sequence"
MSPDFIKLEKQEAAFYFNQTELNLKAIESNILDKQQRMILLNNPRILAKVGNFIFNFRDVTKNAKGEIDCLLFKLEELRNFYSHYVHTDNVKELSNGEKPLLERYYQIAIQATRSEDVKFELFETRNENKITDAGVLFFLCMFLKKSQANKLISGISGFKRNDPTGQPRRNLFTYFSAREGYKALPDMQKHFLLFTLVNYLSNQDEYISELKQYGEIGQGAFFNRIASTFLNISGISGNTKFYSYQSKRIKEQRGELNSEKDSFEWIEPFQGNSYFEINGHKGVIGEDELKELCYALLVAKQDINAVEGKIMQFLKKFRNTGNLQQVKDDEMLEIEYFPASYFNESKKEDIKKEILGRLDKKIRSCSAKAEKAYDKMKEVMEFINNSLPAEEKLKRKDYRRYLKMVRFWSREKGNIEREFRTKEWSKYFSSDFWRKNNLEDVYKLATQKNAELFKNLKAAAEKMGETEFEKYQQINDVKDLASLRRLTQDFGLKWEEKDWEEYSEQIKKQITDRQKLTIMKQRVTAELKKKHGIENLNLRITIDSNKSRKAVLNRIAIPRGFVKKHILGWQGSEKISKNIREAECKILLSKKYEELSRQFFEAGNFDKLTQINGLYEKNKLTAFMSVYLMGRLNIQLNKHTELGNLKKTEVDFKISDKVTEKIPFSQYPSLVYAMSRKYVDNVDKYKFSHQDKKKPFLGKIDSIEKERIEFIKEVLDFEEYLFKNKVIDKSKFSDTATHISFKEICDEMGKKGCNRNKLTELNNARNAALHGEIPSETSFREAKPLINELKK

SEQ ID NO: 54 - protein, 792 aa, Unknown
  source: /note="Description of Unknown: Cas13f.3 sequence"
MSPDFIKLEKQEAAFYFNQTELNLKAIESNIFDKQQRVILLNNPQILAKVGDFIFNFRDVTKNAKGEIDCLLLKLRELRNFYSHYVYTDDVKILSNGERPLLEKYYQFAIEATGSENVKLEIIESNNRLTEAGVLFFLCMFLKKSQANKLISGISGFKRNDPTGQPRRNLFTYFSVREGYKVVPDMQKHFLLFVLVNHLSGQDDYIEKAQKPYDIGEGLFFHRIASTFLNISGILRNMEFYIYQSKRLKEQQGELKREKDIFPWIEPFQGNSYFEINGNKGIIGEDELKELCYALLVAGKDVRAVEGKITQFLEKFKNADNAQQVEKDEMLDRNNFPANYFAESNIGSIKEKILNRLGKTDDSYNKTGTKIKPYDMMKEVMEFINNSLPADEKLKRKDYRRYLKMVRIWDSEKDNIKREFESKEWSKYFSSDFWMAKNLERVYGLAREKNAELFNKLKAVVEKMDEREFEKYRLINSAEDLASLRRLAKDFGLKWEEKDWQEYSGQIKKQISDRQKLTIMKQRITAELKKKHGIENLNLRITIDSNKSRKAVLNRIAVPRGFVKEHILGWQGSEKVSKKTREAKCKILLSKEYEELSKQFFQTRNYDKMTQVNGLYEKNKLLAFMVVYLMERLNILLNKPTELNELEKAEVDFKISDKVMAKIPFSQYPSLVYAMSSKYADSVGSYKFENDEKNKPFLGKIDTIEKQRMEFIKEVLGFEEYLFEKKIIDKSEFADTATHISFDEICNELIKKGWDKDKLTKLKDARNAALHGEIPAETSFREAKPLINGLKK

SEQ ID NO: 55 - protein, 799 aa, Unknown
  source: /note="Description of Unknown: Cas13f.4 sequence"
MNIIKLKKEEAAFYFNQTILNLSGLDEIIEKQIPHIISNKENAKKVIDKIFNNRLLLKSVENYIYNFKDVAKNARTEIEAILLKLVELRNFYSHYVHNDTVKILSNGEKPILEKYYQIAIEATGSKNVKLVIIENNNCLTDSGVLFLLCMFLKKSQANKLISSVSGFKRNDKEGQPRRNLFTYYSVREGYKVVPDMQKHFLLFALVNHLSEQDDHIEKQQQSDELGKGLFFHRIASTFLNESGIFNKMQFYTYQSNRLKEKRGELKHEKDTFTWIEPFQGNSYFTLNGHKGVISEDQLKELCYTILIEKQNVDSLEGKIIQFLKKFQNVSSKQQVDEDELLKREYFPANYFGRAGTGTLKEKILNRLDKRMDPTSKVTDKAYDKMIEVMEFINMCLPSDEKLRQKDYRRYLKMVRFWNKEKHNIKREFDSKKWTRFLPTELWNKRNLEEAYQLARKENKKKLEDMRNQVRSLKENDLEKYQQINYVNDLENLRLLSQELGVKWQEKDWVEYSGQIKKQISDNQKLTIMKQRITAELKKMHGIENLNLRISIDTNKSRQTVMNRIALPKGFVKNHIQQNSSEKISKRIREDYCKIELSGKYEELSRQFFDKKNFDKMTLINGLCEKNKLIAFMVIYLLERLGFELKEKTKLGELKQTRMTYKISDKVKEDIPLSYYPKLVYAMNRKYVDNIDSYAFAAYESKKAILDKVDIIEKQRMEFIKQVLCFEEYIFENRIIEKSKFNDEETHISFTQIHDELIKKGRDTEKLSKLKHARNKALHGEIPDGTSFEKAKLLINEIKK

SEQ ID NO: 56 - protein, 803 aa, Unknown
  source: /note="Description of Unknown: Cas13f.5 sequence"
MNAIELKKEEAAFYFNQARLNISGLDEIIEKQLPHIGSNRENAKKTVDMILDNPEVLKKMENYVFNSRDIAKNARGELEALLLKLVELRNFYSHYVHKDDVKTLSYGEKPLLDKYYEIAIEATGSKDVRLEIIDDKNKLTDAGVLFLLCMFLKKSEANKLISSIRGFKRNDKEGQPRRNLFTYYSVREGYKVVPDMQKHFLLFTLVNHLSNQDEYISNLRPNQEIGQGGFFHRIASKFLSDSGILHSMKFYTYRSKRLTEQRGELKPKKDHFTWIEPFQGNSYFSVQGQKGVIGEEQLKELCYVLLVAREDFRAVEGKVTQFLKKFQNANNVQQVEKDEVLEKEYFPANYFENRDVGRVKDKILNRLKKITESYKAKGREVKAYDKMKEVMEFINNCLPTDENLKLKDYRRYLKMVRFWGREKENIKREFDSKKWERFLPRELWQKRNLEDAYQLAKEKNTELFNKLKTTVERMNELEFEKYQQINDAKDLANLRQLARDFGVKWEEKDWQEYSGQIKKQITDRQKLTIMKQRITAALKKKQGIENLNLRITTDTNKSRKVVLNRIALPKGFVRKHILKTDIKISKQIRQSQCPIILSNNYMKLAKEFFEERNFDKMTQINGLFEKNVLIAFMIVYLMEQLNLRLGKNTELSNLKKTEVNFTITDKVTEKVQISQYPSLVFAINREYVDGISGYKLPPKKPKEPPYTFFEKIDAIEKERMEFIKQVLGFEEHLFEKNVIDKTRFTDTATHISFNEICDELIKKGWDENKIIKLKDARNAALHGKIPEDTSFDEAKVLINELKK

SEQ ID NO: 57 - DNA, 36 bp, Unknown
  source: /note="Description of Unknown: Cas13e.1 sequence"
gctggagcagcccccgatttgtggggtgattacagc

SEQ ID NO: 58 - DNA, 36 bp, Unknown
  source: /note="Description of Unknown: Cas13e.2 sequence"
gctgaagaagcctccgatttgagaggtgattacagc

SEQ ID NO: 59 - DNA, 36 bp, Unknown
  source: /note="Description of Unknown: Cas13f.1 sequence"
gctgtgatagacctcgatttgtggggtagtaacagc

SEQ ID NO: 60 - DNA, 36 bp, Unknown; identical to SEQ ID NO: 59
  source: /note="Description of Unknown: Cas13f.2 sequence"

SEQ ID NO: 61 - DNA, 36 bp, Unknown; identical to SEQ ID NO: 59
  source: /note="Description of Unknown: Cas13f.3 sequence"

SEQ ID NO: 62 - DNA, 36 bp, Unknown
  source: /note="Description of Unknown: Cas13f.4 sequence"
gctgtgatgggcctcaatttgtggggaagtaacagc

SEQ ID NO: 63 - DNA, 36 bp, Unknown
  source: /note="Description of Unknown: Cas13f.5 sequence"
gctgtgataggcctcgatttgtggggtagtaacagc

SEQ ID NO: 64 - protein, 6 aa, Artificial Sequence
  source: /note="Description of Artificial Sequence: Synthetic peptide"
  VARIANT (3)..(3): /replace="Phe"
  VARIANT (4)..(4): /replace="Tyr"
  SITE (1)..(6): /note="Variant residues given in the sequence have no preference with respect to those in the annotations for variant positions"
RNYFSH

SEQ ID NO: 65 - protein, 6 aa, Unknown
  source: /note="Description of Unknown: Cas13 sequence"
RNYFSH

SEQ ID NO: 66 - protein, 6 aa, Unknown
  source: /note="Description of Unknown: Cas13 sequence"
RNFYSH

SEQ ID NO: 67 - protein, 6 aa, Artificial Sequence
  source: /note="Description of Artificial Sequence: Synthetic peptide"
  VARIANT (3)..(3): /replace="Lys"
  SITE (1)..(6): /note="Variant residues given in the sequence have no preference with respect to those in the annotations for variant positions"
RNAALH

SEQ ID NO: 68 - protein, 6 aa, Unknown
  source: /note="Description of Unknown: Cas13 sequence"
RAFFHH

SEQ ID NO: 69 - protein, 6 aa, Unknown
  source: /note="Description of Unknown: Cas13 sequence"
RRAFFH

SEQ ID NO: 70 - protein, 7 aa, Artificial Sequence
  source: /note="Description of Artificial Sequence: Synthetic peptide"
GSGGGGS

SEQ ID NO: 71 - protein, 15 aa, Artificial Sequence
  source: /note="Description of Artificial Sequence: Synthetic peptide"
GGGGSGGGGSGGGGS

SEQ ID NO: 72 - protein, 336 aa, Artificial Sequence
  source: /note="Description of Artificial Sequence: Synthetic polypeptide"
SLGTGNRCVKGDSLSLKGETVNDCHAEIISRRGFIRFLYSELMKYNSQTAKDSIFEPAKGGEKLQIKKTVSFHLYISTAPCGDGALFDKSCSDRAMESTESRHYPVFENPKQGKLRTKVENGEGTIPVESSDIVPTWDGIRLGERLRTMSCSDKILRWNVLGLQGALLTHFLQPIYLKSVTLGYLFSQGHLTRAICCRVTRDGSAFEDGLRHPFIVNHPKVGRVSIYDSKRQSGKTKETSVNWCLADGYDLEILDGTRGTVDGPRNELSRVSKKNIFLLFKKLCSFRYRRDLLRLSYGEAKKAARDYETAKNYFKKGLKDMGYGNWISKPQEEKNF

SEQ ID NO: 73 - protein, 336 aa, Artificial Sequence
  source: /note="Description of Artificial Sequence: Synthetic polypeptide"
SLGTGNRCVKGDSLSLKGETVNDCHAEIISRRGFIRFLYSELMKYNSQTAKDSIFEPAKGGEKLQIKKTVSFHLYISTAPCGDGALFDKSCSDRAMESTESRHYPVFENPKQGKLRTKVENGQGTIPVESSDIVPTWDGIRLGERLRTMSCSDKILRWNVLGLQGALLTHFLQPIYLKSVTLGYLFSQGHLTRAICCRVTRDGSAFEDGLRHPFIVNHPKVGRVSIYDSKRQSGKTKETSVNWCLADGYDLEILDGTRGTVDGPRNELSRVSKKNIFLLFKKLCSFRYRRDLLRLSYGEAKKAARDYETAKNYFKKGLKDMGYGNWISKPQEEKNF

SEQ ID NO: 74 - protein, 385 aa, Artificial Sequence
  source: /note="Description of Artificial Sequence: Synthetic polypeptide"
QLHLPQVLADAVSRLVLGKFGDLTDNFSSPHARRKVLAGVVMTTGTDVKDAKVISVSTGTKCINGEYMSDRGLALNDCHAEIISRRSLLRFLYTQLELYLNNKDDQKRSIFQKSERGGFRLKENVQFHLYISTSPCGDARIFSPHEPILEEPADRHPNRKARGQLRTKIESGEGTIPVRSNASIQTWDGVLQGERLLTMSCSDKIARWNVVGIQGSLLSIFVEPIYFSSIILGSLYHGDHLSRAMYQRISNIEDLPPLYTLNKPLLSGISNAEARQPGKAPNFSVNWTVGDSAIEVINATTGKDELGRASRLCKHALYCRWMRVHGKVPSHLLRSKITKPNVYHESKLAAKEYQAAKARLFTAFIKAGLGAWVEKPTEQDQFSLT

SEQ ID NO: 75 - protein, 385 aa, Artificial Sequence
  source: /note="Description of Artificial Sequence: Synthetic polypeptide"
QLHLPQVLADAVSRLVLGKFGDLTDNFSSPHARRKVLAGVVMTTGTDVKDAKVISVSTGTKCINGEYMSDRGLALNDCHAEIISRRSLLRFLYTQLELYLNNKDDQKRSIFQKSERGGFRLKENVQFHLYISTSPCGDARIFSPHEPILEEPADRHPNRKARGQLRTKIESGQGTIPVRSNASIQTWDGVLQGERLLTMSCSDKIARWNVVGIQGSLLSIFVEPIYFSSIILGSLYHGDHLSRAMYQRISNIEDLPPLYTLNKPLLSGISNAEARQPGKAPNFSVNWTVGDSAIEVINATTGKDELGRASRLCKHALYCRWMRVHGKVPSHLLRSKITKPNVYHESKLAAKEYQAAKARLFTAFIKAGLGAWVEKPTEQDQFSLT

SEQ ID NO: 76 - protein, 198 aa, Artificial Sequence [sequence omitted]

SEQ ID NO: 77 - protein, 208 aa, Artificial Sequence
  source: /note="Description of Artificial Sequence: Synthetic polypeptide"
MTDAEYVRIHEKLDIYTFKKQFFNNKKSVSHRCYVLFELKRRGERRACFWGYAVNKPQSGTERGIHAEIFSIRKVEEYLRDNPGQFTINWYSSWSPCADCAEKILEWYNQELRGNGHTLKIWACKLYYEKNARNQIGLWNLRDNGVGLNVMVSEHYQCCRKIFIQSSHNQLNENRWLEKTLKRAEKRRSELSIMIQVKILHTTKSPAV

SEQ ID NO: 78 - protein, 229 aa, Artificial Sequence [sequence omitted]

SEQ ID NO: 79 - protein, 7 aa, Artificial Sequence
  source: /note="Description of Artificial Sequence: Synthetic peptide"
PKKKRKV

SEQ ID NO: 80 - protein, 16 aa, Artificial Sequence
  source: /note="Description of Artificial Sequence: Synthetic peptide"
KRPAATKKAGQAKKKK

SEQ ID NO: 81 - protein, 9 aa, Artificial Sequence
  source: /note="Description of Artificial Sequence: Synthetic peptide"
PAAKRVKLD

SEQ ID NO: 82 - protein, 11 aa, Artificial Sequence
  source: /note="Description of Artificial Sequence: Synthetic peptide"
RQRRNELKRSP

SEQ ID NO: 83 - protein, 38 aa, Artificial Sequence
  source: /note="Description of Artificial Sequence: Synthetic polypeptide"
NQSSNFGPMKGGNFGGRSSGPYGGGGQYFAKPRNQGGY

SEQ ID NO: 84 - protein, 42 aa, Artificial Sequence
  source: /note="Description of Artificial Sequence: Synthetic polypeptide"
RMRIZFKNKGKDTAELRRRRVEVSVELRKAKKDEQILKRRNV

SEQ ID NO: 85 - protein, 8 aa, Artificial Sequence
  source: /note="Description of Artificial Sequence: Synthetic peptide"
VSRKRPRP

SEQ ID NO: 86 - protein, 8 aa, Artificial Sequence
  source: /note="Description of Artificial Sequence: Synthetic peptide"
PPKKARED

SEQ ID NO: 87 - protein, 8 aa, Artificial Sequence
  source: /note="Description of Artificial Sequence: Synthetic peptide"
PQPKKKPL

SEQ ID NO: 88 - protein, 12 aa, Artificial Sequence
  source: /note="Description of Artificial Sequence: Synthetic peptide"
SALIKKKKKMAP

SEQ ID NO: 89 - protein, 5 aa, Artificial Sequence
  source: /note="Description of Artificial Sequence: Synthetic peptide"
DRLRR

SEQ ID NO: 90 - protein, 7 aa, Artificial Sequence
  source: /note="Description of Artificial Sequence: Synthetic peptide"
PKQKKRK

SEQ ID NO: 91 - protein, 10 aa, Artificial Sequence
  source: /note="Description of Artificial Sequence: Synthetic peptide"
RKLKKKIKKL

SEQ ID NO: 92 - protein, 10 aa, Artificial Sequence
  source: /note="Description of Artificial Sequence: Synthetic peptide"
REKKKFLKRR

SEQ ID NO: 93 - protein, 20 aa, Artificial Sequence
  source: /note="Description of Artificial Sequence: Synthetic peptide"
KRKGDEVDGVDEVAKKKSKK

SEQ ID NO: 94 - protein, 17 aa, Artificial Sequence
  source: /note="Description of Artificial Sequence: Synthetic peptide"
RKCLQAGMNLEARKTKK

SEQ ID NO: 95 - RNA, 36 nt, Artificial Sequence
  source: /note="Description of Artificial Sequence: Synthetic oligonucleotide"
ggcccaacaugaggaucacccaugucugcaggggcc

SEQ ID NO: 96 - RNA, 29 nt, Artificial Sequence
  source: /note="Description of Artificial Sequence: Synthetic oligonucleotide"
ggcccaugcugucuaagacagcaugggcc

SEQ ID NO: 97 - RNA, 34 nt, Artificial Sequence
  source: /note="Description of Artificial Sequence: Synthetic oligonucleotide"
ggcccuaaggguuuauauggaaacccuuagggcc

SEQ ID NO: 98 - protein, 130 aa, Artificial Sequence
  source: /note="Description of Artificial Sequence: Synthetic polypeptide"
MASNFTQFVLVDNGGTGDVTVAPSNFANGVAEWISSNSRSQAYKVTCSVRQSSAQKRKYTIKVEVPKVATQTVGGVELPVAAWRSYLNMELTIPIFATNSDCELIVKAMQGLLKDGNPIPSAIAANSGIY

SEQ ID NO: 99 - protein, 133 aa, Artificial Sequence
  source: /note="Description of Artificial Sequence: Synthetic polypeptide"
MAKLETVTLGNIGKDGKQTLVLNPRGVNPTNGVASLSQAGAVPALEKRVTVSVSQPSRNRKNYKVQVKIQNPTACTANGSCDPSVTRQAYADVTFSFTQYSTDEERAFVRTELAALLASPLLIDAIDQLNPAY

SEQ ID NO: 100 - protein, 128 aa, Artificial Sequence
  source: /note="Description of Artificial Sequence: Synthetic polypeptide"
MSKTIVLSVGEATRTLTEIQSTADRQIFEEKVGPLVGRLRLTASLRQNGAKTAYRVNLKLDQADVVDCSTSVCGELPKVRYTQVWSHDVTIVANSTEASRKSLYDLTKSLVVQATSEDLVVNLVPLGR

SEQ ID NO: 101 - protein, 967 aa, Unknown
  source: /note="Description of Unknown: Cas13d sequence"
MIEKKKSFAKGMGVKSTLVSGSKVYMTTFAEGSDARLEKIVEGDSIRSVNEGEAFSAEMADKNAGYKIGNAKFSHPKGYAVVANNPLYTGPVQQDMLGLKETLEKRYFGESADGNDNICIQVIHNILDIEKILAEYITNAAYAVNNISGLDKDIIGFGKFSTVYTYDEFKDPEHHRAAFNNNDKLINAIKAQYDEFDNFLDNPRLGYFGQAFFSKEGRNYIINYGNECYDILALLSGLRHWVVHNNEEESRISRTWLYNLDKNLDNEYISTLNYLYDRITNELTNSFSKNSAANVNYIAETLGINPAEFAEQYFRFSIMKEQKNLGFNITKLREVMLDRKDMSEIRKNHKVFDSIRTKVYTMMDFVIYRYYIEEDAKVAAANKSLPDNEKSLSEKDIFVINLRGSFNDDQKDALYYDEANRIWRKLENIMHNIKEFRGNKTREYKKKDAPRLPRILPAGRDVSAFSKLMYALTMFLDGKEINDLLTTLINKFDNIQSFLKVMPLIGVNAKFVEEYAFFKDSAKIADELRLIKSFARMGEPIADARRAMYIDAIRILGTNLSYDELKALADTFSLDENGNKLKKGKHGMRNFIINNVISNKRFHYLIRYGDPAHLHEIAKNEAVVKFVLGRIADIQKKQGQNGKNQIDRYYETCIGKDKGKSVSEKVDALTKIITGMNYDQFDKKRSVIEDTGRENAEREKFKKIISLYLTVIYHILKNIVNINARYVIGFHCVERDAQLYKEKGYDINLKKLEEKGFSSVTKLCAGIDETAPDKRKDVEKEMAERAKESIDSLESANPKLYANYIKYSDEKKAEEFTRQINREKAKTALNAYLRNTKWNVIIREDLLRIDNKTCTLFRNKAVHLEVARYVHAYINDIAEVNSYFQLYHYIMQRIIMNERYEKSSGKVSEYFDAVNDEKKYNDRLLKLLCVPFGYCIPRFKNLSIEALFDRNEAAKFDKEKKKVSGNS

SEQ ID NO: 102 - DNA, 2904 bp, Unknown
  source: /note="Description of Unknown: Cas13d sequence"
atgatcgagaagaagaagagcttcgccaagggcatgggagtgaagagcaccctggtgtccggctctaaggtgtacatgaccacatttgctgagggaagcgacgccaggctggagaagatcgtggagggcgatagcatcagatccgtgaacgagggagaggctttcagcgccgagatggctgacaagaacgctggctacaagatcggaaacgccaagttttcccacccaaagggctacgccgtggtggctaacaacccactgtacaccggaccagtgcagcaggacatgctgggactgaaggagacactggagaagaggtacttcggcgagtccgccgacggaaacgataacatctgcatccaggtcatccacaacatcctggatatcgagaagatcctggctgagtacatcacaaacgccgcttacgccgtgaacaacatctccggcctggacaaggatatcatcggcttcggaaagttttctaccgtgtacacatacgacgagttcaaggatccagagcaccaccgggccgcttttaacaacaacgacaagctgatcaacgccatcaaggctcagtacgacgagttcgataactttctggataaccccaggctgggctacttcggacaggctttcttttctaaggagggcagaaactacatcatcaactacggaaacgagtgttacgacatcctggccctgctgagcggactgaggcactgggtggtgcacaacaacgaggaggagtctcggatcagccgcacctggctgtacaacctggacaagaacctggataacgagtacatctccacactgaactacctgtacgacaggatcaccaacgagctgacaaacagcttctccaagaactctgccgctaacgtgaactacatcgctgagaccctgggcatcaacccagctgagttcgctgagcagtacttcagattttccatcatgaaggagcagaagaacctgggcttcaacatcacaaagctgagagaagtgatgctggacagaaaggatatgtccgagatcaggaagaaccacaaggtgttcgattctatcagaaccaaggtgtacacaatgatggactttgtgatctacaggtactacatcgaggaggatgccaaggtggccgctgccaacaagagcctgcccgacaacgagaagtctctgagcgagaaggatatcttcgtgatcaacctgagaggctcctttaacgacgatcagaaggacgctctgtactacgatgaggccaacaggatctggagaaagctggagaacatcatgcacaacatcaaggagttccggggaaacaagacccgcgagtacaagaagaaggacgctccaaggctgcctaggatcctgcctgctggaagggacgtgagcgccttcagcaagctgatgtacgccctgacaatgtttctggacggaaaggagatcaacgatctgctgaccacactgatcaacaagttcgacaacatccagtcttttctgaaagtgatgcctctgatcggcgtgaacgctaagttcgtggaggagtacgccttctttaaggacagcgccaagatcgctgatgagctgcggctgatcaagtcctttgccaggatgggagagccaatcgctgacgctaggagagctatgtacatcgatgccatccggatcctgggaaccaacctgtcttacgacgagctgaaggctctggccgacaccttcagcctggatgagaacggcaacaagctgaagaagggcaagcacggaatgcgcaacttcatcatcaacaacgtgatcagcaacaagcggtttcactacctgatcagatacggcgacccagctcacctgcacgagatcgctaagaacgaggccgtggtgaagttcgtgctgggacggatcgccgatatccagaagaagcagggccagaacggaaagaaccagatcgaccgctactacgagacctgcatcggcaaggataagggaaagtccgtgtctgagaaggtggacgctctgaccaagatcatcacaggcatgaactacgaccagttcgataagaagagatctgtgatcgaggacaccggaagggagaacgccgagagagagaagtttaagaagatcatcagcctgtacctgacagtgatctaccacatcctgaagaacatcgtgaacatcaacgctagatacgtgatcggcttccactgcgtggagcgcgatgcccagctgtacaaggagaagggatacgacatcaacctgaagaagctggaggagaagggctttagctccgtgaccaagctgtgcgctggaatcgacgagacagcccccgacaagaggaaggatgtggagaaggagatggccgagagagctaaggagagcatcgactccctggagtctgctaaccctaagctgtacgccaactacatcaagtactccgatgagaagaaggccgaggagttcaccaggcagatcaacagagagaaggccaagaccgctctgaacgcctacctgaggaacacaaagtggaacgtgatcatccgggaggacctgctgcgcatcgataacaagacctgtacactgttccggaacaaggctgtgcacctggaggtggctcgctacgtgcacgcctacatcaacgacatcgccgaggtgaactcctactttcagctgtaccactacatcatgcagaggatcatcatgaacgagagatacgagaagtctagcggcaaggtgtctgagtacttcgacgccgtgaacgatgagaagaagtacaacgatagactgctgaagctgctgtgcgtgcctttcggatactgtatcccacggtttaagaacctgagcatcgaggccctgttcgaccgcaacgaggctgccaagtttgataaggagaagaagaaggtgagcggcaactcctag

SEQ ID NO: 103 - DNA, 794 bp, Artificial Sequence
  source: /note="Description of Artificial Sequence: Synthetic polynucleotide"
cgttacataacttacggtaaatggcccgcctggctgaccgcccaacgacccccgcccattgacgtcaatagtaacgccaatagggactttccattgacgtcaatgggtggagtatttacggtaaactgcccacttggcagtacatcaagtgtatcatatgccaagtacgccccctattgacgtcaatgacggtaaatggcccgcctggcattgtgcccagtacatgaccttatgggactttcctacttggcagtacatctacgtattagtcatcgctattaccatggtcgaggtgagccccacgttctgcttcactctccccatctcccccccctccccacccccaattttgtatttatttattttttaattattttgtgcagcgatgggggcggggggggggggggggcgcgcgccaggcggggcggggcggggcgaggggcggggcggggcgaggcggagaggtgcggcggcagccaatcagagcggcgcgctccgaaagtttccttttatggcgaggcggcggcggcggcggccctataaaaagcgaagcgcgcggcgggcgggagtcgctgcgacgctgccttcgccccgtgccccgctccgccgccgcctcgcgccgcccgccccggctctgactgaccgcgttactcccacaggtgagcgggcgggacggcccttctcctccgggctgtaattagctgagcaagaggtaagggtttaagggatggttggttggtggggtattaatgtttaattacctggagcacctgcctgaaatcactttttttcag

SEQ ID NO: 104 - DNA, 358 bp, Artificial Sequence
  source: /note="Description of Artificial Sequence: Synthetic polynucleotide"
ctgaggcggaaagaaccagctgtggaatgtgtgtcagttagggtgtggaaagtccccaggctccccagcaggcagaagtatgcaaagcatgcatctcaattagtcagcaaccaggtgtggaaagtccccaggctccccagcaggcagaagtatgcaaagcatgcatctcaattagtcagcaaccatagtcccgcccctaactccgcccatcccgcccctaactccgcccagttccgcccattctccgccccatggctgactaattttttttatttatgcagaggccgaggccgcctcggcctctgagctattccagaagtagtgaggaggcttttttggaggcctaggcttttgcaaa

SEQ ID NO: 105 - protein, 17 aa, Unknown
  source: /note="Description of Unknown: Cas13d sequence"
KGYAVVANNPLYTGPVQ

SEQ ID NO: 106 - DNA, 51 bp, Unknown
  source: /note="Description of Unknown: Cas13d sequence"
aagggctacgccgtggtggctaacaacccactgtacaccggaccagtgcag

SEQ ID NO: 107 - protein, 17 aa, Artificial Sequence
  source: /note="Description of Artificial Sequence: Synthetic peptide"
AAYAVVAANPLYAAPVQ

SEQ ID NO: 108 - DNA, 51 bp, Artificial Sequence
  source: /note="Description of Artificial Sequence: Synthetic oligonucleotide"
gccgcctacgccgtggtggctgccaacccactgtacgccgccccagtgcag

SEQ ID NO: 109 - protein, 17 aa, Artificial Sequence
  source: /note="Description of Artificial Sequence: Synthetic peptide"
KGYAAAANAPLYTGPAQ

SEQ ID NO: 110 - DNA, 51 bp, Artificial Sequence
  source: /note="Description of Artificial Sequence: Synthetic oligonucleotide"
aagggctacgccgccgccgctaacgccccactgtacaccggaccagcccag

SEQ ID NO: 111 - protein, 17 aa, Artificial Sequence
  source: /note="Description of Artificial Sequence: Synthetic peptide"
KGYVVVVNNPAYTGPVA

SEQ ID NO: 112 - DNA, 51 bp, Artificial Sequence
  source: /note="Description of Artificial Sequence: Synthetic oligonucleotide"
aagggctacgtggtggtggtgaacaacccagcctacaccggaccagtggcc

SEQ ID NO: 113 - protein, 17 aa, Artificial Sequence
  source: /note="Description of Artificial Sequence: Synthetic peptide"
KGAAVVANNPLYTGPVQ

SEQ ID NO: 114 - DNA, 51 bp, Artificial Sequence
  source: /note="Description of Artificial Sequence: Synthetic oligonucleotide"
aagggcgccgccgtggtggctaacaacccactgtacaccggaccagtgcag

SEQ ID NO: 115 - protein, 17 aa, Artificial Sequence
  source: /note="Description of Artificial Sequence: Synthetic peptide"
KGYAVVANNPLATGPVQ

SEQ ID NO: 116 - DNA, 51 bp, Artificial Sequence
  source: /note="Description of Artificial Sequence: Synthetic oligonucleotide"
aagggctacgccgtggtggctaacaacccactggccaccggaccagtgcag

SEQ ID NO: 117 - protein, 19 aa, Unknown
  source: /note="Description of Unknown: Cas13d sequence"
QDMLGLKETLEKRYFGESA

SEQ ID NO: 118 - DNA, 57 bp, Unknown
  source: /note="Description of Unknown: Cas13d sequence"
caggacatgctgggactgaaggagacactggagaagaggtacttcggcgagtccgcc

SEQ ID NO: 119 - protein, 19 aa, Artificial Sequence
  source: /note="Description of Artificial Sequence: Synthetic peptide"
AAMLGLAETLEARYFGEAA

SEQ ID NO: 120 - DNA, 57 bp, Artificial Sequence
  source: /note="Description of Artificial Sequence: Synthetic oligonucleotide"
gccgccatgctgggactggccgagacactggaggccaggtacttcggcgaggccgcc

SEQ ID NO: 121 - protein, 19 aa, Artificial Sequence
  source: /note="Description of Artificial Sequence: Synthetic peptide"
QDMAAAKEALEKRYFAESA

SEQ ID NO: 122 - DNA, 57 bp, Artificial Sequence
  source: /note="Description of Artificial Sequence: Synthetic oligonucleotide"
caggacatggccgccgccaaggaggccctggagaagaggtacttcgccgagtccgcc

SEQ ID NO: 123 - protein, 19 aa, Artificial Sequence
  source: /note="Description of Artificial Sequence: Synthetic peptide"
QDALGLKATAEKRYAGESA

SEQ ID NO: 124 - DNA, 57 bp, Artificial Sequence
  source: /note="Description of Artificial Sequence: Synthetic oligonucleotide"
caggacgccctgggactgaaggccacagccgagaagaggtacgccggcgagtccgcc

SEQ ID NO: 125 - protein, 19 aa, Artificial Sequence
  source: /note="Description of Artificial Sequence: Synthetic peptide"
QDMLGLKETLAKAYFGASV

SEQ ID NO: 126 - DNA, 57 bp, Artificial Sequence
  source: /note="Description of Artificial Sequence: Synthetic oligonucleotide"
caggacatgctgggactgaaggagacactggccaaggcctacttcggcgcctccgtg

SEQ ID NO: 127 - protein, 19 aa, Artificial Sequence
  source: /note="Description of Artificial Sequence: Synthetic peptide"
QDMLGLKETLEKRAFGESA

SEQ ID NO: 128 - DNA, 57 bp, Artificial Sequence
  source: /note="Description of Artificial Sequence: Synthetic oligonucleotide"
caggacatgctgggactgaaggagacactggagaagagggccttcggcgagtccgcc

SEQ ID NO: 129 - protein, 17 aa, Unknown
  source: /note="Description of Unknown: Cas13d sequence"
DGNDNICIQVIHNILDI

SEQ ID NO: 130 - DNA, 51 bp, Unknown
  source: /note="Description of Unknown: Cas13d sequence"
gacggaaacgataacatctgcatccaggtcatccacaacatcctggatatc

SEQ ID NO: 131 - protein, 17 aa, Artificial Sequence
  source: /note="Description of Artificial Sequence: Synthetic peptide"
AAAANICIQVIHNILAI

SEQ ID NO: 132 - DNA, 51 bp, Artificial Sequence
  source: /note="Description of Artificial Sequence: Synthetic oligonucleotide"
gccgccgccgccaacatctgcatccaggtcatccacaacatcctggccatc

SEQ ID NO: 133 - protein, 17 aa, Artificial Sequence
  source: /note="Description of Artificial Sequence: Synthetic peptide"
DGNDAICIAAIHAILDI

SEQ ID NO: 134 - DNA, 51 bp, Artificial Sequence
  source: /note="Description of Artificial Sequence: Synthetic oligonucleotide"
gacggaaacgatgccatctgcatcgccgccatccacgccatcctggatatc

SEQ ID NO: 135 - protein, 17 aa, Artificial Sequence
  source: /note="Description of Artificial Sequence: Synthetic peptide"
DGNDNAAIQVIANIADI

SEQ ID NO: 136 - DNA, 51 bp, Artificial Sequence
  source: /note="Description of Artificial Sequence: Synthetic oligonucleotide"
gacggaaacgataacgccgccatccaggtcatcgccaacatcgccgatatc

SEQ ID NO: 137 - protein, 17 aa, Artificial Sequence
  source: /note="Description of Artificial Sequence: Synthetic peptide"
DGNDNICAQVAHNALDA

SEQ ID NO: 138 - DNA, 51 bp, Artificial Sequence
  source: /note="Description of Artificial Sequence: Synthetic oligonucleotide"
gacggaaacgataacatctgcgcccaggtcgcccacaacgccctggatgcc

SEQ ID NO: 139 - protein, 19 aa, Unknown
  source: /note="Description of Unknown: Cas13d sequence"
EKILAEYITNAAYAVNNIS

SEQ ID NO: 140 - DNA, 57 bp, Unknown
  source: /note="Description of Unknown: Cas13d sequence"
gagaagatcctggctgagtacatcacaaacgccgcttacgccgtgaacaacatctcc

SEQ ID NO: 141 - protein, 19 aa, Artificial Sequence
  source: /note="Description of Artificial Sequence: Synthetic peptide"
AAILAEYIAAAAYAVNNIA

SEQ ID NO: 142 - DNA, 57 bp, Artificial Sequence
  source: /note="Description of Artificial Sequence: Synthetic oligonucleotide"
gccgccatcctggctgagtacatcgccgccgccgcttacgccgtgaacaacatcgcc

SEQ ID NO: 143 - protein, 19 aa, Artificial Sequence
  source: /note="Description of Artificial Sequence: Synthetic peptide"
EKIAAEYITNAAYAAAAIS

SEQ ID NO: 144 - DNA, 57 bp, Artificial Sequence
  source: /note="Description of Artificial Sequence: Synthetic oligonucleotide"
gagaagatcgccgctgagtacatcacaaacgccgcttacgccgccgccgccatctcc

SEQ ID NO: 145 - protein, 19 aa, Artificial Sequence
  source: /note="Description of Artificial Sequence: Synthetic peptide"
EKALAAYATNAAYAVNNAS

SEQ ID NO: 146 - DNA, 57 bp, Artificial Sequence
  source: /note="Description of Artificial Sequence: Synthetic oligonucleotide"
gagaaggccctggctgcctacgccacaaacgccgcttacgccgtgaacaacgcctcc

SEQ ID NO: 147 - protein, 19 aa, Artificial Sequence
  source: /note="Description of Artificial Sequence: Synthetic peptide"
EKILVEYITNVVYVVNNIS

SEQ ID NO: 148 - DNA, 57 bp, Artificial Sequence
  source: /note="Description of Artificial Sequence: Synthetic oligonucleotide"
gagaagatcctggtggagtacatcacaaacgtggtgtacgtggtgaacaacatctcc

SEQ ID NO: 149 - protein, 19 aa, Artificial Sequence
  source: /note="Description of Artificial Sequence: Synthetic peptide"
EKILAEAITNAAYAVNNIS

SEQ ID NO: 150 - DNA, 57 bp, Artificial Sequence
  source: /note="Description of Artificial Sequence: Synthetic oligonucleotide"
gagaagatcctggctgaggccatcacaaacgccgcttacgccgtgaacaacatctcc

SEQ ID NO: 151 - protein, 19 aa, Artificial Sequence
  source: /note="Description of Artificial Sequence: Synthetic peptide"
EKILAEYITNAAAAVNNIS

SEQ ID NO: 152 - DNA, 57 bp, Artificial Sequence
  source: /note="Description of Artificial Sequence: Synthetic oligonucleotide"
gagaagatcctggctgagtacatcacaaacgccgctgccgccgtgaacaacatctcc

SEQ ID NO: 153 - protein, 17 aa, Unknown
  source: /note="Description of Unknown: Cas13d sequence"
GLDKDIIGFGKFSTVYT

SEQ ID NO: 154 - DNA, 51 bp, Unknown
  source: /note="Description of Unknown: Cas13d sequence"
ggcctggacaaggatatcatcggcttcggaaagttttctaccgtgtacaca

SEQ ID NO: 155 - protein, 17 aa, Artificial Sequence
  source: /note="Description of Artificial Sequence: Synthetic peptide"
ALDADIIGFGAFATVYT

SEQ ID NO: 156 - DNA, 51 bp, Artificial Sequence
  source: /note="Description of Artificial Sequence: Synthetic oligonucleotide"
gccctggacgccgatatcatcggcttcggagcctttgccaccgtgtacaca

SEQ ID NO: 157 - protein, 17 aa, Artificial Sequence
  source: /note="Description of Artificial Sequence: Synthetic peptide"
GLDKDIIAFAKFSAVYA

SEQ ID NO: 158 - DNA, 51 bp, Artificial Sequence
  source: /note="Description of Artificial Sequence: Synthetic oligonucleotide"
ggcctggacaaggatatcatcgccttcgccaagttttctgccgtgtacgcc

SEQ ID NO: 159 - protein, 17 aa, Artificial Sequence
  source: /note="Description of Artificial Sequence: Synthetic peptide"
GAAKAIIGFGKFSTAYT

SEQ ID NO: 160 - DNA, 51 bp, Artificial Sequence
  source: /note="Description of Artificial Sequence: Synthetic oligonucleotide"
ggcgccgccaaggccatcatcggcttcggaaagttttctaccgcctacaca

SEQ ID NO: 161 - protein, 17 aa, Artificial Sequence
  source: /note="Description of Artificial Sequence: Synthetic peptide"
GLDKDAAGAGKASTVYT

SEQ ID NO: 162 - DNA, 51 bp, Artificial Sequence
  source: /note="Description of Artificial Sequence: Synthetic oligonucleotide"
ggcctggacaaggatgccgccggcgccggaaaggcctctaccgtgtacaca

SEQ ID NO: 163 - protein, 17 aa, Artificial Sequence
  source: /note="Description of Artificial Sequence: Synthetic peptide"
GLDKDIIGFGKFSTVAT

SEQ ID NO: 164 - DNA, 51 bp, Artificial Sequence
  source: /note="Description of Artificial Sequence: Synthetic oligonucleotide"
ggcctggacaaggatatcatcggcttcggaaagttttctaccgtggccaca

SEQ ID NO: 165 - protein, 19 aa, Unknown
  source: /note="Description of Unknown: Cas13d sequence"
YDEFKDPEHHRAAFNNNDK

SEQ ID NO: 166 - DNA, 57 bp, Unknown
  source: /note="Description of Unknown: Cas13d sequence"
tacgacgagttcaaggatccagagcaccaccgggccgcttttaacaacaacgacaag

SEQ ID NO: 167 - protein, 19 aa, Artificial Sequence
  source: /note="Description of Artificial Sequence: Synthetic peptide"
AAEFAAPEHHRAAFNNNDA

SEQ ID NO: 168 - DNA, 57 bp, Artificial Sequence
  source: /note="Description of Artificial Sequence: Synthetic oligonucleotide"
gccgccgagttcgccgccccagagcaccaccgggccgcttttaacaacaacgacgcc

SEQ ID NO: 169 - protein, 19 aa, Artificial Sequence
  source: /note="Description of Artificial Sequence: Synthetic peptide"
YDEFKDPEAHRAAFAAAAK

SEQ ID NO: 170 - DNA, 57 bp, Artificial Sequence
  source: /note="Description of Artificial Sequence: Synthetic oligonucleotide"
tacgacgagttcaaggatccagaggcccaccgggccgcttttgccgccgccgccaag

SEQ ID NO: 171 - protein, 19 aa, Artificial Sequence
  source: /note="Description of Artificial Sequence: Synthetic peptide"
YDAAKDPEHARAAANNNDK

SEQ ID NO: 172 - DNA, 57 bp, Artificial Sequence
  source: /note="Description of Artificial Sequence: Synthetic oligonucleotide"
tacgacgccgccaaggatccagagcacgcccgggccgctgccaacaacaacgacaag

SEQ ID NO: 173 - protein, 19 aa, Artificial Sequence
  source: /note="Description of Artificial Sequence: Synthetic peptide"
YDEFKDPAHHAVVFNNNDK

SEQ ID NO: 174 - DNA, 57 bp, Artificial Sequence
  source: /note="Description of Artificial Sequence: Synthetic oligonucleotide"
tacgacgagttcaaggatccagcccaccacgccgtggtgtttaacaacaacgacaag

SEQ ID NO: 175 - protein, 19 aa, Artificial Sequence
  source: /note="Description of Artificial Sequence: Synthetic peptide"
ADEFKDPEHHRAAFNNNDK

SEQ ID NO: 176 - DNA, 57 bp, Artificial Sequence
  source: /note="Description of Artificial Sequence: Synthetic oligonucleotide"
gccgacgagttcaaggatccagagcaccaccgggccgcttttaacaacaacgacaag

SEQ ID NO: 177 - protein, 17 aa, Unknown
  source: /note="Description of Unknown: Cas13d sequence"
LINAIKAQYDEFDNFLD

SEQ ID NO: 178 - DNA, 51 bp, Unknown
  source: /note="Description of Unknown: Cas13d sequence"
ctgatcaacgccatcaaggctcagtacgacgagttcgataactttctggat

SEQ ID NO: 179 - protein, 17 aa, Artificial Sequence
  source: /note="Description of Artificial Sequence: Synthetic peptide"
LINAIAAQYAEFANFLA

SEQ ID NO: 180 - DNA, 51 bp, Artificial Sequence
  source: /note="Description of Artificial Sequence: Synthetic oligonucleotide"
ctgatcaacgccatcgccgctcagtacgccgagttcgccaactttctggcc

SEQ ID NO: 181 - protein, 17 aa, Artificial Sequence
  source: /note="Description of Artificial Sequence: Synthetic peptide"
AIAAIKAAYDEFDAFLD

SEQ ID NO: 182 - DNA, 51 bp, Artificial Sequence
  source: /note="Description of Artificial Sequence: Synthetic oligonucleotide"
gccatcgccgccatcaaggctgcctacgacgagttcgatgcctttctggat

SEQ ID NO: 183 - protein, 17 aa, Artificial Sequence
  source: /note="Description of Artificial Sequence: Synthetic peptide"
LANAAKAQYDEADNFAD

SEQ ID NO: 184 - DNA, 51 bp, Artificial Sequence
  source: /note="Description of Artificial Sequence: Synthetic oligonucleotide"
ctggccaacgccgccaaggctcagtacgacgaggccgataactttgccgat

SEQ ID NO: 185 - protein, 17 aa, Artificial Sequence
  source: /note="Description of Artificial Sequence: Synthetic peptide"
LINVIKVQYDAFDNALD

SEQ ID NO: 186 - DNA, 51 bp, Artificial Sequence
  source: /note="Description of Artificial Sequence: Synthetic oligonucleotide"
ctgatcaacgtgatcaaggtgcagtacgacgccttcgataacgccctggat

SEQ ID NO: 187 - protein, 17 aa, Artificial Sequence
  source: /note="Description of Artificial Sequence: Synthetic peptide"
LINAIKAQADEFDNFLD

SEQ ID NO: 188 - DNA, 51 bp, Artificial Sequence
  source: /note="Description of Artificial Sequence: Synthetic oligonucleotide"
ctgatcaacgccatcaaggctcaggccgacgagttcgataactttctggat

SEQ ID NO: 189 - protein, 19 aa, Unknown
  source: /note="Description of Unknown: Cas13d sequence"
NPRLGYFGQAFFSKEGRNY

SEQ ID NO: 190 - DNA, 57 bp, Unknown
  source: /note="Description of Unknown: Cas13d sequence"
aaccccaggctgggctacttcggacaggctttcttttctaaggagggcagaaactac

SEQ ID NO: 191 - protein, 19 aa, Artificial Sequence
  source: /note="Description of Artificial Sequence: Synthetic peptide"
AARLAYFGQAFFAAEGRNY

SEQ ID NO: 192 - DNA, 57 bp, Artificial Sequence
  source: /note="Description of Artificial Sequence: Synthetic oligonucleotide"
gccgccaggctggcctacttcggacaggctttctttgccgccgagggcagaaactac

SEQ ID NO: 193 - protein, 19 aa, Artificial Sequence
  source: /note="Description of Artificial Sequence: Synthetic peptide"
NPRLGYFAAAFFSKEARAY

SEQ ID NO: 194 - DNA, 57 bp, Artificial Sequence
  source: /note="Description of Artificial Sequence: Synthetic oligonucleotide"
aaccccaggctgggctacttcgccgccgctttcttttctaaggaggccagagcctac

SEQ ID NO: 195 - protein, 19 aa, Artificial Sequence
  source: /note="Description of Artificial Sequence: Synthetic peptide"
NPRAGYAGQAAASKEGRNY

SEQ ID NO: 196 - DNA, 57 bp, Artificial Sequence
  source: /note="Description of Artificial Sequence: Synthetic oligonucleotide"
aaccccagggccggctacgccggacaggctgccgcctctaaggagggcagaaactac

SEQ ID NO: 197 - protein, 19 aa, Artificial Sequence
  source: /note="Description of Artificial Sequence: Synthetic peptide"
NPALGYFGQVFFSKAGANY

SEQ ID NO: 198 - DNA, 57 bp, Artificial Sequence
  source: /note="Description of Artificial Sequence: Synthetic oligonucleotide"
aaccccgccctgggctacttcggacaggtgttcttttctaaggccggcgccaactac

SEQ ID NO: 199 - protein, 19 aa, Artificial Sequence
  source: /note="Description of Artificial Sequence: Synthetic peptide"
NPRLGAFGQAFFSKEGRNY

SEQ ID NO: 200 - DNA, 57 bp, Artificial Sequence
  source: /note="Description of Artificial Sequence: Synthetic oligonucleotide"
aaccccaggctgggcgccttcggacaggctttcttttctaaggagggcagaaactac

SEQ ID NO: 201 - protein, 19 aa, Artificial Sequence
  source: /note="Description of Artificial Sequence: Synthetic peptide"
NPRLGYFGQAFFSKEGRNA

SEQ ID NO: 202 - DNA, 57 bp, Artificial Sequence
  source: /note="Description of Artificial Sequence: Synthetic oligonucleotide"
aaccccaggctgggctacttcggacaggctttcttttctaaggagggcagaaacgcc

SEQ ID NO: 203 - protein, 17 aa, Unknown
  source: /note="Description of Unknown: Cas13d sequence"
IINYGNECYDILALLSG

SEQ ID NO: 204 - DNA, 51 bp, Unknown
  source: /note="Description of Unknown: Cas13d sequence"
atcatcaactacggaaacgagtgttacgacatcctggccctgctgagcgga

SEQ ID NO: 205 - protein, 17 aa, Artificial Sequence
  source: /note="Description of Artificial Sequence: Synthetic peptide"
IIAYANECYAILALLAA

SEQ ID NO: 206 - DNA, 51 bp, Artificial Sequence
  source: /note="Description of Artificial Sequence: Synthetic oligonucleotide"
atcatcgcctacgccaacgagtgttacgccatcctggccctgctggccgcc

SEQ ID NO: 207 - protein, 17 aa, Artificial Sequence
  source: /note="Description of Artificial Sequence: Synthetic peptide"
IINYGAEAYDIAAAASG

SEQ ID NO: 208 - DNA, 51 bp, Artificial Sequence
  source: /note="Description of Artificial Sequence: Synthetic oligonucleotide"
atcatcaactacggagccgaggcctacgacatcgccgccgccgccagcgga

SEQ ID NO: 209 - protein, 17 aa, Artificial Sequence
  source: /note="Description of Artificial Sequence: Synthetic peptide"
AANYGNACYDALVLLSG

SEQ ID NO: 210 - DNA, 51 bp, Artificial Sequence
  source: /note="Description of Artificial Sequence: Synthetic oligonucleotide"
gccgccaactacggaaacgcctgttacgacgccctggtgctgctgagcgga

SEQ ID NO: 211 - protein, 19 aa, Unknown
  source: /note="Description of Unknown: Cas13d sequence"
LRHWVVHNNEEESRISRTW

SEQ ID NO: 212 - DNA, 57 bp, Unknown
  source: /note="Description of Unknown: Cas13d sequence"
ctgaggcactgggtggtgcacaacaacgaggaggagtctcggatcagccgcacctgg

SEQ ID NO: 213 - protein, 19 aa, Artificial Sequence
  source: /note="Description of Artificial Sequence: Synthetic peptide"
AAHWVVHNNEEEARIARAW

SEQ ID NO: 214 - DNA, 57 bp, Artificial Sequence
  source: /note="Description of Artificial Sequence: Synthetic oligonucleotide"
gccgcccactgggtggtgcacaacaacgaggaggaggcccggatcgcccgcgcctgg

SEQ ID NO: 215 - protein, 19 aa, Artificial Sequence
  source: /note="Description of Artificial Sequence: Synthetic peptide"
LRHWVVHAAAAESRASRTW

SEQ ID NO: 216 - DNA, 57 bp, Artificial Sequence
  source: /note="Description of Artificial Sequence: Synthetic oligonucleotide"
ctgaggcactgggtggtgcacgccgccgccgccgagtctcgggccagccgcacctgg

SEQ ID NO: 217 - protein, 19 aa, Artificial Sequence
  source: /note="Description of Artificial Sequence: Synthetic peptide"
LRHWVVHNNEEASAISATA

SEQ ID NO: 218 - DNA, 57 bp, Artificial Sequence
  source: /note="Description of Artificial Sequence: Synthetic oligonucleotide"
ctgaggcactgggtggtgcacaacaacgaggaggcctctgccatcagcgccaccgcc

SEQ ID NO: 219 - protein, 17 aa, Unknown
  source: /note="Description of Unknown: Cas13d sequence"
LYNLDKNLDNEYISTLN

SEQ ID NO: 220 - DNA, 51 bp, Unknown
  source: /note="Description of Unknown: Cas13d sequence"
ctgtacaacctggacaagaacctggataacgagtacatctccacactgaac

SEQ ID NO: 221 - protein, 17 aa, Artificial Sequence
  source: /note="Description of Artificial Sequence: Synthetic peptide"
LYNLAANLANEYIAALN

SEQ ID NO: 222 - DNA, 51 bp, Artificial Sequence
  source: /note="Description of Artificial Sequence: Synthetic oligonucleotide"
ctgtacaacctggccgccaacctggccaacgagtacatcgccgccctgaac

SEQ ID NO: 223 - protein, 17 aa, Artificial Sequence
  source: /note="Description of Artificial Sequence: Synthetic peptide"
AYALDKALDAEYISTLA

SEQ ID NO: 224 - DNA, 51 bp, Artificial Sequence
  source: /note="Description of Artificial Sequence: Synthetic oligonucleotide"
gcctacgccctggacaaggccctggatgccgagtacatctccacactggcc

SEQ ID NO: 225 - protein, 17 aa, Artificial Sequence
  source: /note="Description of Artificial Sequence: Synthetic peptide"
LYNADKNADNAYASTAN

SEQ ID NO: 226 - DNA, 51 bp, Artificial Sequence
  source: /note="Description of Artificial Sequence: Synthetic oligonucleotide"
ctgtacaacgccgacaagaacgccgataacgcctacgcctccacagccaac

SEQ ID NO: 227 - protein, 17 aa, Artificial Sequence
  source: /note="Description of Artificial Sequence: Synthetic peptide"
LANLDKNLDNEYISTLN

SEQ ID NO: 228 - DNA, 51 bp, Artificial Sequence
  source: /note="Description of Artificial Sequence: Synthetic oligonucleotide"
ctggccaacctggacaagaacctggataacgagtacatctccacactgaac

SEQ ID NO: 229 - protein, 17 aa, Artificial Sequence
  source: /note="Description of Artificial Sequence: Synthetic peptide"
LYNLDKNLDNEAISTLN

SEQ ID NO: 230 - DNA, 51 bp, Artificial Sequence
  source: /note="Description of Artificial Sequence: Synthetic oligonucleotide"
ctgtacaacctggacaagaacctggataacgaggccatctccacactgaac

SEQ ID NO: 231 - protein, 19 aa, Unknown
  source: /note="Description of Unknown: Cas13d sequence"
YLYDRITNELTNSFSKNSA

SEQ ID NO: 232 - DNA, 57 bp, Unknown
  source: /note="Description of Unknown: Cas13d sequence"
tacctgtacgacaggatcaccaacgagctgacaaacagcttctccaagaactctgcc

SEQ ID NO: 233 - protein, 19 aa, Artificial Sequence
  source: /note="Description of Artificial Sequence: Synthetic peptide"
AAYDRITNELTNAFAANSA

SEQ ID NO: 234 - DNA, 57 bp, Artificial Sequence
  source: /note="Description of Artificial Sequence: Synthetic oligonucleotide"
gccgcctacgacaggatcaccaacgagctgacaaacgccttcgccgccaactctgcc

SEQ ID NO: 235 - protein, 19 aa, Artificial Sequence
  source: /note="Description of Artificial Sequence: Synthetic peptide"
YLYARIAAELANSFSKNAA

SEQ ID NO: 236 - DNA, 57 bp, Artificial Sequence
  source: /note="Description of Artificial Sequence: Synthetic oligonucleotide"
tacctgtacgccaggatcgccgccgagctggccaacagcttctccaagaacgccgcc

SEQ ID NO: 237 - protein, 19 aa, Artificial Sequence
  source: /note="Description of Artificial Sequence: Synthetic peptide"
YLYDRATNEATASFSKASA

SEQ ID NO: 238 - DNA, 57 bp, Artificial Sequence
  source: /note="Description of Artificial Sequence: Synthetic oligonucleotide"
tacctgtacgacagggccaccaacgaggccacagccagcttctccaaggcctctgcc

SEQ ID NO: 239 - protein, 19 aa, Artificial Sequence
  source: /note="Description of Artificial Sequence: Synthetic peptide"
YLYDAITNALTNSASKNSV

SEQ ID NO: 240 - DNA, 57 bp, Artificial Sequence
  source: /note="Description of Artificial Sequence: Synthetic oligonucleotide"
tacctgtacgacgccatcaccaacgccctgacaaacagcgcctccaagaactctgtg

SEQ ID NO: 241 - protein, 19 aa, Artificial Sequence
  source: /note="Description of Artificial Sequence: Synthetic peptide"
ALYDRITNELTNSFSKNSA

SEQ ID NO: 242 - DNA, 57 bp, Artificial Sequence
  source: /note="Description of Artificial Sequence: Synthetic oligonucleotide"
gccctgtacgacaggatcaccaacgagctgacaaacagcttctccaagaactctgcc

SEQ ID NO: 243 - protein, 19 aa, Artificial Sequence
  source: /note="Description of Artificial Sequence: Synthetic peptide"
YLADRITNELTNSFSKNSA

SEQ ID NO: 244 - DNA, 57 bp, Artificial Sequence
  source: /note="Description of Artificial Sequence: Synthetic oligonucleotide"
tacctggccgacaggatcaccaacgagctgacaaacagcttctccaagaactctgcc

SEQ ID NO: 245 - protein, 17 aa, Unknown
  source: /note="Description of Unknown: Cas13d sequence"
ANVNYIAETLGINPAEF

SEQ ID NO: 246 - DNA, 51 bp, Unknown
  source: /note="Description of Unknown: Cas13d sequence"
gctaacgtgaactacatcgctgagaccctgggcatcaacccagctgagttc

SEQ ID NO: 247 - protein, 17 aa, Artificial Sequence
  source: /note="Description of Artificial Sequence: Synthetic peptide"
AAVAYIAEALAIAPAEF

SEQ ID NO: 248 - DNA, 51 bp, Artificial Sequence
  source: /note="Description of Artificial Sequence: Synthetic oligonucleotide"
gctgccgtggcctacatcgctgaggccctggccatcgccccagctgagttc

SEQ ID NO: 249 - protein, 17 aa, Artificial Sequence
  source: /note="Description of Artificial Sequence: Synthetic peptide"
ANANYAAETAGANPAEA

SEQ ID NO: 250 - DNA, 51 bp, Artificial Sequence
  source: /note="Description of Artificial Sequence: Synthetic oligonucleotide"
gctaacgccaactacgccgctgagaccgccggcgccaacccagctgaggcc

SEQ ID NO: 251 - protein, 17 aa, Artificial Sequence
  source: /note="Description of Artificial Sequence: Synthetic peptide"
VNVNYIVATLGINPVAF

SEQ ID NO: 252 - DNA, 51 bp, Artificial Sequence
  source: /note="Description of Artificial Sequence: Synthetic oligonucleotide"
gtgaacgtgaactacatcgtggccaccctgggcatcaacccagtggccttc

SEQ ID NO: 253 - protein, 17 aa, Artificial Sequence
  source: /note="Description of Artificial Sequence: Synthetic peptide"
ANVNAIAETLGINPAEF

SEQ ID NO: 254 - DNA, 51 bp, Artificial Sequence
  source: /note="Description of Artificial Sequence: Synthetic oligonucleotide"
gctaacgtgaacgccatcgctgagaccctgggcatcaacccagctgagttc

SEQ ID NO: 255 - protein, 19 aa, Unknown
  source: /note="Description of Unknown: Cas13d sequence"
AEQYFRFSIMKEQKNLGFN

SEQ ID NO: 256 - DNA, 57 bp, Unknown
  source: /note="Description of Unknown: Cas13d sequence"
gctgagcagtacttcagattttccatcatgaaggagcagaagaacctgggcttcaac

SEQ ID NO: 257 - protein, 19 aa, Artificial Sequence
  source: /note="Description of Artificial Sequence: Synthetic peptide"
VAQYFRFAIMAEQANLGFN

SEQ ID NO: 258 - DNA, 57 bp, Artificial Sequence
  source: /note="Description of Artificial Sequence: Synthetic oligonucleotide"
gtggcccagtacttcagatttgccatcatggccgagcaggccaacctgggcttcaac

SEQ ID NO: 259 - protein, 19 aa, Artificial Sequence
  source: /note="Description of Artificial Sequence: Synthetic peptide"
AEAYFRFSIMKEAKALAFA

SEQ ID NO: 260 - DNA, 57 bp, Artificial Sequence
  source: /note="Description of Artificial Sequence: Synthetic oligonucleotide"
gctgaggcctacttcagattttccatcatgaaggaggccaaggccctggccttcgcc

SEQ ID NO: 261 - protein, 19 aa, Artificial Sequence
  source: /note="Description of Artificial Sequence: Synthetic peptide"
AEQYARFSAAKEQKNAGFN

SEQ ID NO: 262 - DNA, 57 bp, Artificial Sequence
  source: /note="Description of Artificial Sequence: Synthetic oligonucleotide"
gctgagcagtacgccagattttccgccgccaaggagcagaagaacgccggcttcaac

SEQ ID NO: 263 - protein, 19 aa, Artificial Sequence
  source: /note="Description of Artificial Sequence: Synthetic peptide"
AEQYFAASIMKAQKNLGAN

SEQ ID NO: 264 - DNA, 57 bp, Artificial Sequence
  source: /note="Description of Artificial Sequence: Synthetic oligonucleotide"
gctgagcagtacttcgccgcctccatcatgaaggcccagaagaacctgggcgccaac

SEQ ID NO: 265 - protein, 19 aa, Artificial Sequence
  source: /note="Description of Artificial Sequence: Synthetic peptide"
AEQAFRFSIMKEQKNLGFN

SEQ ID NO: 266 - DNA, 57 bp, Artificial Sequence
  source: /note="Description of Artificial Sequence: Synthetic oligonucleotide"
gctgagcaggccttcagattttccatcatgaaggagcagaagaacctgggcttcaac

SEQ ID NO: 267 - protein, 17 aa, Unknown
  source: /note="Description of Unknown: Cas13d sequence"
AGRDVSAFSKLMYALTM

SEQ ID NO: 268 - DNA, 51 bp, Unknown
  source: /note="Description of Unknown: Cas13d sequence"
gctggaagggacgtgagcgccttcagcaagctgatgtacgccctgacaatg

SEQ ID NO: 269 - protein, 17 aa, Artificial Sequence
  source: /note="Description of Artificial Sequence: Synthetic peptide"
AARDVAAFAALMYALTM

SEQ ID NO: 270 - DNA, 51 bp, Artificial Sequence
  source: /note="Description of Artificial Sequence: Synthetic oligonucleotide"
gctgccagggacgtggccgccttcgccgccctgatgtacgccctgacaatg

SEQ ID NO: 271 - protein, 17 aa, Artificial Sequence
  source: /note="Description of Artificial Sequence: Synthetic peptide"
AGRAASAFSKAMYALAM

SEQ ID NO: 272 - DNA, 51 bp, Artificial Sequence
  source: /note="Description of Artificial Sequence: Synthetic oligonucleotide"
gctggaagggccgccagcgccttcagcaaggccatgtacgccctggccatg

SEQ ID NO: 273 - protein, 17 aa, Artificial Sequence
  source: /note="Description of Artificial Sequence: Synthetic peptide"
AGRDVSAASKLAYAATA

SEQ ID NO: 274 - DNA, 51 bp, Artificial Sequence
  source: /note="Description of Artificial Sequence: Synthetic oligonucleotide"
gctggaagggacgtgagcgccgccagcaagctggcctacgccgccacagcc

SEQ ID NO: 275 - protein, 17 aa, Artificial Sequence
  source: /note="Description of Artificial Sequence: Synthetic peptide"
VGADVSVFSKLMYVLTM

SEQ ID NO: 276 - DNA, 51 bp, Artificial Sequence
  source: /note="Description of Artificial Sequence: Synthetic oligonucleotide"
gtgggagccgacgtgagcgtgttcagcaagctgatgtacgtgctgacaatg

SEQ ID NO: 277 - protein, 17 aa, Artificial Sequence
  source: /note="Description of Artificial Sequence: Synthetic peptide"
AGRDVSAFSKLMAALTM

SEQ ID NO: 278 - DNA, 51 bp, Artificial Sequence
  source: /note="Description of Artificial Sequence: Synthetic oligonucleotide"
gctggaagggacgtgagcgccttcagcaagctgatggccgccctgacaatg

SEQ ID NO: 279 - protein, 19 aa, Unknown
  source: /note="Description of Unknown: Cas13d sequence"
FLDGKEINDLLTTLINKFD

SEQ ID NO: 280 - DNA, 57 bp, Unknown
  source: /note="Description of Unknown: Cas13d sequence"
tttctggacggaaaggagatcaacgatctgctgaccacactgatcaacaagttcgac

SEQ ID NO: 281 - protein, 19 aa, Artificial Sequence
  source: /note="Description of Artificial Sequence: Synthetic peptide"
AADAAEINDLLTTLINAFD

SEQ ID NO: 282 - DNA, 57 bp, Artificial Sequence
  source: /note="Description of Artificial Sequence: Synthetic oligonucleotide"
gccgccgacgccgccgagatcaacgatctgctgaccacactgatcaacgccttcgac

SEQ ID NO: 283 - protein, 19 aa, Artificial Sequence
  source: /note="Description of Artificial Sequence: Synthetic peptide"
FLAGKEINALLAALINKFA

SEQ ID NO: 284 - DNA, 57 bp, Artificial Sequence
  source: /note="Description of Artificial Sequence: Synthetic oligonucleotide"
tttctggccggaaaggagatcaacgccctgctggccgccctgatcaacaagttcgcc

SEQ ID NO: 285 - protein, 19 aa, Artificial Sequence
  source: /note="Description of Artificial Sequence: Synthetic peptide"
FLDGKEIADAATTAIAKFD

SEQ ID NO: 286 - DNA, 57 bp, Artificial Sequence
  source: /note="Description of Artificial Sequence: Synthetic oligonucleotide"
tttctggacggaaaggagatcgccgatgccgccaccacagccatcgccaagttcgac

SEQ ID NO: 287 - protein, 19 aa, Artificial Sequence
  source: /note="Description of Artificial Sequence: Synthetic peptide"
FLDGKAANDLLTTLANKAD

SEQ ID NO: 288 - DNA, 57 bp, Artificial Sequence
  source: /note="Description of Artificial Sequence: Synthetic oligonucleotide"
tttctggacggaaaggccgccaacgatctgctgaccacactggccaacaaggccgac

SEQ ID NO: 289 - protein, 17 aa, Unknown
  source: /note="Description of Unknown: Cas13d sequence"
NIQSFLKVMPLIGVNAK

SEQ ID NO: 290 - DNA, 51 bp, Unknown
  source: /note="Description of Unknown: Cas13d sequence"
aacatccagtcttttctgaaagtgatgcctctgatcggcgtgaacgctaag

SEQ ID NO: 291 - protein, 17 aa, Artificial Sequence
  source: /note="Description of Artificial Sequence: Synthetic peptide"
NIQAFLAVMPLIAVNAA

SEQ ID NO: 292 - DNA, 51 bp, Artificial Sequence
  source: /note="Description of Artificial Sequence: Synthetic oligonucleotide"
aacatccaggcctttctggccgtgatgcctctgatcgccgtgaacgctgcc

SEQ ID NO: 293 - protein, 17 aa, Artificial Sequence
  source: /note="Description of Artificial Sequence: Synthetic peptide"
AIQSFLKAMPLIGAAAK

SEQ ID NO: 294 - DNA, 51 bp, Artificial Sequence
  source: /note="Description of Artificial Sequence: Synthetic oligonucleotide"
gccatccagtcttttctgaaagccatgcctctgatcggcgccgccgctaag

SEQ ID NO: 295 - protein, 17 aa, Artificial Sequence
  source: /note="Description of Artificial Sequence: Synthetic peptide"
NIASFAKVAPAIGVNAK

SEQ ID NO: 296 - DNA, 51 bp, Artificial Sequence
  source: /note="Description of Artificial Sequence: Synthetic oligonucleotide"
aacatcgcctcttttgccaaagtggcccctgccatcggcgtgaacgctaag

SEQ ID NO: 297 - protein, 17 aa, Artificial Sequence
  source: /note="Description of Artificial Sequence: Synthetic peptide"
NAQSALKVMPLAGVNVK

SEQ ID NO: 298 - DNA, 51 bp, Artificial Sequence
  source: /note="Description of Artificial Sequence: Synthetic oligonucleotide"
aacgcccagtctgccctgaaagtgatgcctctggccggcgtgaacgtgaag

SEQ ID NO: 299 - protein, 19 aa, Unknown
  source: /note="Description of Unknown: Cas13d sequence"
FVEEYAFFKDSAKIADELR

SEQ ID NO: 300 - DNA, 57 bp, Unknown
  source: /note="Description of Unknown: Cas13d sequence"
ttcgtggaggagtacgccttctttaaggacagcgccaagatcgctgatgagctgcgg

SEQ ID NO: 301 - protein, 19 aa, Artificial Sequence
  source: /note="Description of Artificial Sequence: Synthetic peptide"
AAEEYAFFADAAAIADELR

SEQ ID NO: 302 - DNA, 57 bp, Artificial Sequence
  source: /note="Description of Artificial Sequence: Synthetic oligonucleotide"
gccgccgaggagtacgccttctttgccgacgccgccgccatcgctgatgagctgcgg

SEQ ID NO: 303 - protein, 19 aa, Artificial Sequence
  source: /note="Description of Artificial Sequence: Synthetic peptide"
FVEEYAAFKASAKAAAEAR

SEQ ID NO: 304 - DNA, 57 bp, Artificial Sequence
  source: /note="Description of Artificial Sequence: Synthetic oligonucleotide"
ttcgtggaggagtacgccgcctttaaggccagcgccaaggccgctgccgaggcccgg

SEQ ID NO: 305 - protein, 19 aa, Artificial Sequence
  source: /note="Description of Artificial Sequence: Synthetic peptide"
FVAAYAFAKDSAKIADALR

SEQ ID NO: 306 - DNA, 57 bp, Artificial Sequence
  source: /note="Description of Artificial Sequence: Synthetic oligonucleotide"
ttcgtggccgcctacgccttcgccaaggacagcgccaagatcgctgatgccctgcgg

SEQ ID NO: 307 - protein, 19 aa, Artificial Sequence
  source: /note="Description of Artificial Sequence: Synthetic peptide"
FVEEYVFFKDSVKIVDELA

SEQ ID NO: 308 - DNA, 57 bp, Artificial Sequence
  source: /note="Description of Artificial Sequence: Synthetic oligonucleotide"
ttcgtggaggagtacgtgttctttaaggacagcgtgaagatcgtggatgagctggcc

SEQ ID NO: 309 - protein, 19 aa, Artificial Sequence
  source: /note="Description of Artificial Sequence: Synthetic peptide"
FVEEAAFFKDSAKIADELR

SEQ ID NO: 310 - DNA, 57 bp, Artificial Sequence
  source: /note="Description of Artificial Sequence: Synthetic oligonucleotide"
ttcgtggaggaggccgccttctttaaggacagcgccaagatcgctgatgagctgcgg

SEQ ID NO: 311 - protein, 17 aa, Unknown
  source: /note="Description of Unknown: Cas13d sequence"
LIKSFARMGEPIADARR

SEQ ID NO: 312 - DNA, 51 bp, Unknown
  source: /note="Description of Unknown: Cas13d sequence"
ctgatcaagtcctttgccaggatgggagagccaatcgctgacgctaggaga

SEQ ID NO: 313 - protein, 17 aa, Artificial Sequence
  source: /note="Description of Artificial Sequence: Synthetic peptide"
LIAAFARMAEPIAAARR

SEQ ID NO: 314 - DNA, 51 bp, Artificial Sequence
  source: /note="Description of Artificial Sequence: Synthetic oligonucleotide"
ctgatcgccgcctttgccaggatggccgagccaatcgctgccgctaggaga

SEQ ID NO: 315 - protein, 17 aa, Artificial Sequence
  source: /note="Description of Artificial Sequence: Synthetic peptide"
AAKSFARAGEPAADARR

SEQ ID NO: 316 - DNA, 51 bp, Artificial Sequence
  source: /note="Description of Artificial Sequence: Synthetic oligonucleotide"
gccgccaagtcctttgccagggccggagagccagccgctgacgctaggaga

SEQ ID NO: 317 - protein, 17 aa, Artificial Sequence
  source: /note="Description of Artificial Sequence: Synthetic peptide"
LIKSAVRMGAPIVDARR

SEQ ID NO: 318 - DNA, 51 bp, Artificial Sequence
  source: /note="Description of Artificial Sequence: Synthetic oligonucleotide"
ctgatcaagtccgccgtgaggatgggagccccaatcgtggacgctaggaga

SEQ ID NO: 319 - protein, 17 aa, Artificial Sequence
  source: /note="Description of Artificial Sequence: Synthetic peptide"
LIKSFAAMGEPIADVAA

SEQ ID NO: 320 - DNA, 51 bp, Artificial Sequence
  source: /note="Description of Artificial Sequence: Synthetic oligonucleotide"
ctgatcaagtcctttgccgccatgggagagccaatcgctgacgtggccgcc

SEQ ID NO: 321 - protein, 19 aa, Unknown
  source: /note="Description of Unknown: Cas13d sequence"
AMYIDAIRILGTNLSYDEL

SEQ ID NO: 322 - DNA, 57 bp, Unknown
  source: /note="Description of Unknown: Cas13d sequence"
gctatgtacatcgatgccatccggatcctgggaaccaacctgtcttacgacgagctg

SEQ ID NO: 323 - protein, 19 aa, Artificial Sequence
  source: /note="Description of Artificial Sequence: Synthetic peptide"
VAYIDAIRILAANLAYDEL

SEQ ID NO: 324 - DNA, 57 bp, Artificial Sequence
  source: /note="Description of Artificial Sequence: Synthetic oligonucleotide"
gtggcctacatcgatgccatccggatcctggccgccaacctggcctacgacgagctg

SEQ ID NO: 325 - protein, 19 aa, Artificial Sequence
  source: /note="Description of Artificial Sequence: Synthetic peptide"
AMYIAAIRIAGTALSYAEL

SEQ ID NO: 326 - DNA, 57 bp, Artificial Sequence
  source: /note="Description of Artificial Sequence: Synthetic oligonucleotide"
gctatgtacatcgccgccatccggatcgccggaaccgccctgtcttacgccgagctg

SEQ ID NO: 327 - protein, 19 aa, Artificial Sequence
  source: /note="Description of Artificial Sequence: Synthetic peptide"
AMYADAARILGTNASYDEA

SEQ ID NO: 328 - DNA, 57 bp, Artificial Sequence
  source: /note="Description of Artificial Sequence: Synthetic oligonucleotide"
gctatgtacgccgatgccgcccggatcctgggaaccaacgcctcttacgacgaggcc

SEQ ID NO: 329 - protein, 19 aa, Artificial Sequence
  source: /note="Description of Artificial Sequence: Synthetic peptide"
AMYIDVIAALGTNLSYDAL

SEQ ID NO: 330 - DNA, 57 bp, Artificial Sequence
  source: /note="Description of Artificial Sequence: Synthetic oligonucleotide"
gctatgtacatcgatgtgatcgccgccctgggaaccaacctgtcttacgacgccctg

SEQ ID NO: 331 - protein, 19 aa, Artificial Sequence
  source: /note="Description of Artificial Sequence: Synthetic peptide"
AMAIDAIRILGTNLSYDEL

SEQ ID NO: 332 - DNA, 57 bp, Artificial Sequence
  source: /note="Description of Artificial Sequence: Synthetic oligonucleotide"
gctatggccatcgatgccatccggatcctgggaaccaacctgtcttacgacgagctg

SEQ ID NO: 333 - protein, 19 aa, Artificial Sequence
  source: /note="Description of Artificial Sequence: Synthetic peptide"
AMYIDAIRILGTNLSADEL

SEQ ID NO: 334 - DNA, 57 bp, Artificial Sequence
  source: /note="Description of Artificial Sequence: Synthetic oligonucleotide"
gctatgtacatcgatgccatccggatcctgggaaccaacctgtctgccgacgagctg

SEQ ID NO: 335 - protein, 17 aa, Unknown
  source: /note="Description of Unknown: Cas13d sequence"
KALADTFSLDENGNKLK

SEQ ID NO: 336 - DNA, 51 bp, Unknown
  source: /note="Description of Unknown: Cas13d sequence"
aaggctctggccgacaccttcagcctggatgagaacggcaacaagctgaag

SEQ ID NO: 337 - protein, 17 aa, Artificial Sequence
  source: /note="Description of Artificial Sequence: Synthetic peptide"
AALADTFALDENANALA

SEQ ID NO: 338 - DNA, 51 bp, Artificial Sequence
  source: /note="Description of Artificial Sequence: Synthetic oligonucleotide"
gccgctctggccgacaccttcgccctggatgagaacgccaacgccctggcc

SEQ ID NO: 339 - protein, 17 aa, Artificial Sequence
  source: /note="Description of Artificial Sequence: Synthetic peptide"
KALAAAFSLAEAGNKLK

SEQ ID NO: 340 - DNA, 51 bp, Artificial Sequence
  source: /note="Description of Artificial Sequence: Synthetic oligonucleotide"
aaggctctggccgccgccttcagcctggccgaggccggcaacaagctgaag

SEQ ID NO: 341 - protein, 17 aa, Artificial Sequence
  source: /note="Description of Artificial Sequence: Synthetic peptide"
KAAADTFSADENGAKAK

SEQ ID NO: 342 - DNA, 51 bp, Artificial Sequence
  source: /note="Description of Artificial Sequence: Synthetic oligonucleotide"
aaggctgccgccgacaccttcagcgccgatgagaacggcgccaaggccaag

SEQ ID NO: 343 - protein, 17 aa, Artificial Sequence
  source: /note="Description of Artificial Sequence: Synthetic peptide"
KVLVDTASLDANGNKLK

SEQ ID NO: 344 - DNA, 51 bp, Artificial Sequence
  source: /note="Description of Artificial Sequence: Synthetic oligonucleotide"
aaggtgctggtggacaccgccagcctggatgccaacggcaacaagctgaag

SEQ ID NO: 345 - protein, 19 aa, Unknown
  source: /note="Description of Unknown: Cas13d sequence"
KGKHGMRNFIINNVISNKR

SEQ ID NO: 346 - DNA, 57 bp, Unknown
  source: /note="Description of Unknown: Cas13d sequence"
aagggcaagcacggaatgcgcaacttcatcatcaacaacgtgatcagcaacaagcgg

SEQ ID NO: 347 - protein, 19 aa, Artificial Sequence
  source: /note="Description of Artificial Sequence: Synthetic peptide"
AAAHGMRNFIINNVIANAR

SEQ ID NO: 348 - DNA, 57 bp, Artificial Sequence
  source: /note="Description of Artificial Sequence: Synthetic oligonucleotide"
gccgccgcccacggaatgcgcaacttcatcatcaacaacgtgatcgccaacgcccgg

SEQ ID NO: 349 - protein, 19 aa, Artificial Sequence
  source: /note="Description of Artificial Sequence: Synthetic peptide"
KGKHAMRAFIIAAVISAKR

SEQ ID NO: 350 - DNA, 57 bp, Artificial Sequence
  source: /note="Description of Artificial Sequence: Synthetic oligonucleotide"
aagggcaagcacgccatgcgcgccttcatcatcgccgccgtgatcagcgccaagcgg

SEQ ID NO: 351 - protein, 19 aa, Artificial Sequence
  source: /note="Description of Artificial Sequence: Synthetic peptide"
KGKAGARNFAANNAISNKR

SEQ ID NO: 352 - DNA, 57 bp, Artificial Sequence
  source: /note="Description of Artificial Sequence: Synthetic oligonucleotide"
aagggcaaggccggagcccgcaacttcgccgccaacaacgccatcagcaacaagcgg

SEQ ID NO: 353 - protein, 19 aa, Artificial Sequence
  source: /note="Description of Artificial Sequence: Synthetic peptide"
KGKHGMANAIINNVASNKA

SEQ ID NO: 354 - DNA, 57 bp, Artificial Sequence
  source: /note="Description of Artificial Sequence: Synthetic oligonucleotide"
aagggcaagcacggaatggccaacgccatcatcaacaacgtggccagcaacaaggcc

SEQ ID NO: 355 - protein, 17 aa, Unknown
  source: /note="Description of Unknown: Cas13d sequence"
FHYLIRYGDPAHLHEIA

SEQ ID NO: 356 - DNA, 51 bp, Unknown
  source: /note="Description of Unknown: Cas13d sequence"
tttcactacctgatcagatacggcgacccagctcacctgcacgagatcgct

SEQ ID NO: 357 - protein, 17 aa, Artificial Sequence
  source: /note="Description of Artificial Sequence: Synthetic peptide"
FAYAIRYAAPAHAHEIA

SEQ ID NO: 358 - DNA, 51 bp, Artificial Sequence
  source: /note="Description of Artificial Sequence: Synthetic oligonucleotide"
tttgcctacgccatcagatacgccgccccagctcacgcccacgagatcgct

SEQ ID NO: 359 - protein, 17 aa, Artificial Sequence
  source: /note="Description of Artificial Sequence: Synthetic peptide"
AHYLARYGDPAALAEAA

SEQ ID NO: 360 - DNA, 51 bp, Artificial Sequence
  source: /note="Description of Artificial Sequence: Synthetic oligonucleotide"
gcccactacctggccagatacggcgacccagctgccctggccgaggccgct

SEQ ID NO: 361 - protein, 17 aa, Artificial Sequence
  source: /note="Description of Artificial Sequence: Synthetic peptide"
FHYLIAYGDPVHLHAIV

SEQ ID NO: 362 - DNA, 51 bp, Artificial Sequence
  source: /note="Description of Artificial Sequence: Synthetic oligonucleotide"
tttcactacctgatcgcctacggcgacccagtgcacctgcacgccatcgtg

SEQ ID NO: 363 - protein, 17 aa, Artificial Sequence
  source: /note="Description of Artificial Sequence: Synthetic peptide"
FHALIRYGDPAHLHEIA

SEQ ID NO: 364 - DNA, 51 bp, Artificial Sequence
  source: /note="Description of Artificial Sequence: Synthetic oligonucleotide"
tttcacgccctgatcagatacggcgacccagctcacctgcacgagatcgct

SEQ ID NO: 365 - protein, 17 aa, Artificial Sequence
  source: /note="Description of Artificial Sequence: Synthetic peptide"
FHYLIRAGDPAHLHEIA

SEQ ID NO: 366 - DNA, 51 bp, Artificial Sequence
  source: /note="Description of Artificial Sequence: Synthetic oligonucleotide"
tttcactacctgatcagagccggcgacccagctcacctgcacgagatcgct

SEQ ID NO: 367 - protein, 19 aa, Unknown
  source: /note="Description of Unknown: Cas13d sequence"
KNEAVVKFVLGRIADIQKK

SEQ ID NO: 368 - DNA, 57 bp, Unknown
  source: /note="Description of Unknown: Cas13d sequence"
aagaacgaggccgtggtgaagttcgtgctgggacggatcgccgatatccagaagaag

SEQ ID NO: 369 - protein, 19 aa, Artificial Sequence
  source: /note="Description of Artificial Sequence: Synthetic peptide"
AAEAVVAFVLGRIADIQAA

SEQ ID NO: 370 - DNA, 57 bp, Artificial Sequence
  source: /note="Description of Artificial Sequence: Synthetic oligonucleotide"
gccgccgaggccgtggtggccttcgtgctgggacggatcgccgatatccaggccgcc

SEQ ID NO: 371 - protein, 19 aa, Artificial Sequence
  source: /note="Description of Artificial Sequence: Synthetic peptide"
KNEAAAKFALARIAAIQKK

SEQ ID NO: 372 - DNA, 57 bp, Artificial Sequence
  source: /note="Description of Artificial Sequence: Synthetic oligonucleotide"
aagaacgaggccgccgccaagttcgccctggcccggatcgccgccatccagaagaag

SEQ ID NO: 373 - protein, 19 aa, Artificial Sequence
  source: /note="Description of Artificial Sequence: Synthetic peptide"
KNEAVVKAVAGRAADAAKK

SEQ ID NO: 374 - DNA, 57 bp, Artificial Sequence
  source: /note="Description of Artificial Sequence: Synthetic oligonucleotide"
aagaacgaggccgtggtgaaggccgtggccggacgggccgccgatgccgccaagaag

SEQ ID NO: 375 - protein, 19 aa, Artificial Sequence
  source: /note="Description of Artificial Sequence: Synthetic peptide"
KNAVVVKFVLGAIVDIQKK

SEQ ID NO: 376 - DNA, 57 bp, Artificial Sequence
  source: /note="Description of Artificial Sequence: Synthetic oligonucleotide"
aagaacgccgtggtggtgaagttcgtgctgggagccatcgtggatatccagaagaag

SEQ ID NO: 377 - protein, 17 aa, Unknown
  source: /note="Description of Unknown: Cas13d sequence"
QGQNGKNQIDRYYETCI

SEQ ID NO: 378 - DNA, 51 bp, Unknown
  source: /note="Description of Unknown: Cas13d sequence"
cagggccagaacggaaagaaccagatcgaccgctactacgagacctgcatc

SEQ ID NO: 379 - protein, 17 aa, Artificial Sequence
  source: /note="Description of Artificial Sequence: Synthetic peptide"
QAQNAANQIARYYEACI

SEQ ID NO: 380 - DNA, 51 bp, Artificial Sequence
  source: /note="Description of Artificial Sequence: Synthetic oligonucleotide"
caggcccagaacgccgccaaccagatcgcccgctactacgaggcctgcatc

SEQ ID NO: 381 - protein, 17 aa, Artificial Sequence
  source: /note="Description of Artificial Sequence: Synthetic peptide"
AGAAGKAAIDRYYETCI

SEQ ID NO: 382 - DNA, 51 bp, Artificial Sequence
  source: /note="Description of Artificial Sequence: Synthetic oligonucleotide"
gccggcgccgccggaaaggccgccatcgaccgctactacgagacctgcatc

SEQ ID NO: 383 - protein, 17 aa, Artificial Sequence
  source: /note="Description of Artificial Sequence: Synthetic peptide"
QGQNGKNQADAYYATAA

SEQ ID NO: 384 - DNA, 51 bp, Artificial Sequence
  source: /note="Description of Artificial Sequence: Synthetic oligonucleotide"
cagggccagaacggaaagaaccaggccgacgcctactacgccaccgccgcc

SEQ ID NO: 385 - protein, 17 aa, Artificial Sequence
  source: /note="Description of Artificial Sequence: Synthetic peptide"
QGQNGKNQIDRAYETCI

SEQ ID NO: 386 - DNA, 51 bp, Artificial Sequence
  source: /note="Description of Artificial Sequence: Synthetic oligonucleotide"
cagggccagaacggaaagaaccagatcgaccgcgcctacgagacctgcatc

SEQ ID NO: 387 - protein, 17 aa, Artificial Sequence
  source: /note="Description of Artificial Sequence: Synthetic peptide"
QGQNGKNQIDRYAETCI

SEQ ID NO: 388 - DNA, 51 bp, Artificial Sequence
  source: /note="Description of Artificial Sequence: Synthetic oligonucleotide"
cagggccagaacggaaagaaccagatcgaccgctacgccgagacctgcatc

SEQ ID NO: 389 - protein, 19 aa, Unknown
  source: /note="Description of Unknown: Cas13d sequence"
GKDKGKSVSEKVDALTKII

SEQ ID NO: 390 - DNA, 57 bp, Unknown
  source: /note="Description of Unknown: Cas13d sequence"
ggcaaggataagggaaagtccgtgtctgagaaggtggacgctctgaccaagatcatc

SEQ ID NO: 391 - protein, 19 aa, Artificial Sequence
  source: /note="Description of Artificial Sequence: Synthetic peptide"
AADAGASVSEAVDALTKII

SEQ ID NO: 392 - DNA, 57 bp, Artificial Sequence
  source: /note="Description of Artificial Sequence: Synthetic oligonucleotide"
gccgccgatgccggagcctccgtgtctgaggccgtggacgctctgaccaagatcatc

SEQ ID NO: 393 - protein, 19 aa, Artificial Sequence
  source: /note="Description of Artificial Sequence: Synthetic peptide"
GKDKAKAVAEKVDALAAII

SEQ ID NO: 394 - DNA, 57 bp, Artificial Sequence
  source: /note="Description of Artificial Sequence: Synthetic oligonucleotide"
ggcaaggataaggccaaggccgtggccgagaaggtggacgctctggccgccatcatc

SEQ ID NO: 395 - protein, 19 aa, Artificial Sequence
  source: /note="Description of Artificial Sequence: Synthetic peptide"
GKAKGKSASEKAAAATKII

SEQ ID NO: 396 - DNA, 57 bp, Artificial Sequence
  source: /note="Description of Artificial Sequence: Synthetic oligonucleotide"
ggcaaggccaagggaaagtccgcctctgagaaggccgccgctgccaccaagatcatc

SEQ ID NO: 397 - protein, 19 aa, Artificial Sequence
  source: /note="Description of Artificial Sequence: Synthetic peptide"
GKDKGKSVSAKVDVLTKAA

SEQ ID NO: 398 - DNA, 57 bp, Artificial Sequence
  source: /note="Description of Artificial Sequence: Synthetic oligonucleotide"
ggcaaggataagggaaagtccgtgtctgccaaggtggacgtgctgaccaaggccgcc

SEQ ID NO: 399 - protein, 17 aa, Unknown
  source: /note="Description of Unknown: Cas13d sequence"
TGMNYDQFDKKRSVIED

SEQ ID NO: 400 - DNA, 51 bp, Unknown
  source: /note="Description of Unknown: Cas13d sequence"
acaggcatgaactacgaccagttcgataagaagagatctgtgatcgaggac

SEQ ID NO: 401 - protein, 17 aa, Artificial Sequence
  source: /note="Description of Artificial Sequence: Synthetic peptide"
TAMNYDQFDAARAVIED

SEQ ID NO: 402 - DNA, 51 bp, Artificial Sequence
  source: /note="Description of Artificial Sequence: Synthetic oligonucleotide"
acagccatgaactacgaccagttcgatgccgccagagccgtgatcgaggac

SEQ ID NO: 403 - protein, 17 aa, Artificial Sequence
  source: /note="Description of Artificial Sequence: Synthetic peptide"
AGMNYAQFAKKRSVIEA

SEQ ID NO: 404 - DNA, 51 bp, Artificial Sequence
  source: /note="Description of Artificial Sequence: Synthetic oligonucleotide"
gccggcatgaactacgcccagttcgccaagaagagatctgtgatcgaggcc

SEQ ID NO: 405 - protein, 17 aa, Artificial Sequence
  source: /note="Description of Artificial Sequence: Synthetic peptide"
TGAAYDAFDKKRSAIED

SEQ ID NO: 406 - DNA, 51 bp, Artificial Sequence
  source: /note="Description of Artificial Sequence: Synthetic oligonucleotide"
acaggcgccgcctacgacgccttcgataagaagagatctgccatcgaggac

SEQ ID NO: 407 - protein, 17 aa, Artificial Sequence
  source: /note="Description of Artificial Sequence: Synthetic peptide"
TGMNYDQADKKASVAAD

SEQ ID NO: 408 - DNA, 51 bp, Artificial Sequence
  source: /note="Description of Artificial Sequence: Synthetic oligonucleotide"
acaggcatgaactacgaccaggccgataagaaggcctctgtggccgccgac

SEQ ID NO: 409 - protein, 17 aa, Artificial Sequence
  source: /note="Description of Artificial Sequence: Synthetic peptide"
TGMNADQFDKKRSVIED

SEQ ID NO: 410 - DNA, 51 bp, Artificial Sequence
  source: /note="Description of Artificial Sequence: Synthetic oligonucleotide"
acaggcatgaacgccgaccagttcgataagaagagatctgtgatcgaggac

SEQ ID NO: 411 - protein, 19 aa, Unknown
  source: /note="Description of Unknown: Cas13d sequence"
TGRENAEREKFKKIISLYL

SEQ ID NO: 412 - DNA, 57 bp, Unknown
  source: /note="Description of Unknown: Cas13d sequence"
accggaagggagaacgccgagagagagaagtttaagaagatcatcagcctgtacctg

SEQ ID NO: 413 - protein, 19 aa, Artificial Sequence
  source: /note="Description of Artificial Sequence: Synthetic peptide"
AARENAEREAFAAIISLYL

SEQ ID NO: 414 - DNA, 57 bp, Artificial Sequence
  source: /note="Description of Artificial Sequence: Synthetic oligonucleotide"
gccgccagggagaacgccgagagagaggcctttgccgccatcatcagcctgtacctg

SEQ ID NO: 415 - protein, 19 aa, Artificial Sequence
  source: /note="Description of Artificial Sequence: Synthetic peptide"
TGREAAEREKFKKAIAAYA

SEQ ID NO: 416 - DNA, 57 bp, Artificial Sequence
  source: /note="Description of Artificial Sequence: Synthetic oligonucleotide"
accggaagggaggccgccgagagagagaagtttaagaaggccatcgccgcctacgcc

SEQ ID NO: 417 - protein, 19 aa, Artificial Sequence
  source: /note="Description of Artificial Sequence: Synthetic peptide"
TGRANAAREKAKKIASLYL

SEQ ID NO: 418 - DNA, 57 bp, Artificial Sequence
  source: /note="Description of Artificial Sequence: Synthetic oligonucleotide"
accggaagggccaacgccgccagagagaaggccaagaagatcgccagcctgtacctg

SEQ ID NO: 419 - protein, 19 aa, Artificial Sequence
  source: /note="Description of Artificial Sequence: Synthetic peptide"
TGAENVEAAKFKKIISLYL

SEQ ID NO: 420 - DNA, 57 bp, Artificial Sequence
  source: /note="Description of Artificial Sequence: Synthetic oligonucleotide"
accggagccgagaacgtggaggccgccaagtttaagaagatcatcagcctgtacctg

SEQ ID NO: 421 - protein, 19 aa, Artificial Sequence
  source: /note="Description of Artificial Sequence: Synthetic peptide"
TGRENAEREKFKKIISLAL

SEQ ID NO: 422 - DNA, 57 bp, Artificial Sequence
  source: /note="Description of Artificial Sequence: Synthetic oligonucleotide"
accggaagggagaacgccgagagagagaagtttaagaagatcatcagcctggccctg

SEQ ID NO: 423 - protein, 17 aa, Unknown
  source: /note="Description of Unknown: Cas13d sequence"
TVIYHILKNIVNINARY

SEQ ID NO: 424 - DNA, 51 bp, Unknown
  source: /note="Description of Unknown: Cas13d sequence"
acagtgatctaccacatcctgaagaacatcgtgaacatcaacgctagatac

SEQ ID NO: 425 - protein, 17 aa, Artificial Sequence
  source: /note="Description of Artificial Sequence: Synthetic peptide"
AVIYHILAAIVAIAARY

SEQ ID NO: 426 - DNA, 51 bp, Artificial Sequence
  source: /note="Description of Artificial Sequence: Synthetic oligonucleotide"
gccgtgatctaccacatcctggccgccatcgtggccatcgccgctagatac

SEQ ID NO: 427 - protein, 17 aa, Artificial Sequence
  source: /note="Description of Artificial Sequence: Synthetic peptide"
TAAYAIAKNIANINARY

SEQ ID NO: 428 - DNA, 51 bp, Artificial Sequence
  source: /note="Description of Artificial Sequence: Synthetic oligonucleotide"
acagccgcctacgccatcgccaagaacatcgccaacatcaacgctagatac

SEQ ID NO: 429 - protein, 17 aa, Artificial Sequence
  source: /note="Description of Artificial Sequence: Synthetic peptide"
TVIYHALKNAVNANVAY

SEQ ID NO: 430 - DNA, 51 bp, Artificial Sequence
  source: /note="Description of Artificial Sequence: Synthetic oligonucleotide"
acagtgatctaccacgccctgaagaacgccgtgaacgccaacgtggcctac

SEQ ID NO: 431 - protein, 19 aa, Unknown
  source: /note="Description of Unknown: Cas13d sequence"
VIGFHCVERDAQLYKEKGY

SEQ ID NO: 432 - DNA, 57 bp, Unknown
  source: /note="Description of Unknown: Cas13d sequence"
gtgatcggcttccactgcgtggagcgcgatgcccagctgtacaaggagaagggatac

SEQ ID NO: 433 - protein, 19 aa, Artificial Sequence
  source: /note="Description of Artificial Sequence: Synthetic peptide"
AAAFHCVERDAQLYAEAGY

SEQ ID NO: 434 - DNA, 57 bp, Artificial Sequence
  source: /note="Description of Artificial Sequence: Synthetic oligonucleotide"
gccgccgccttccactgcgtggagcgcgatgcccagctgtacgccgaggccggatac

SEQ ID NO: 435 - protein, 19 aa, Artificial Sequence
  source: /note="Description of Artificial Sequence: Synthetic peptide"
VIGFHCAERAAALYKEKAY

SEQ ID NO: 436 - DNA, 57 bp, Artificial Sequence
  source: /note="Description of Artificial Sequence: Synthetic oligonucleotide"
gtgatcggcttccactgcgccgagcgcgccgccgccctgtacaaggagaaggcctac

SEQ ID NO: 437 - protein, 19 aa, Artificial Sequence
  source: /note="Description of Artificial Sequence: Synthetic peptide"
VIGAAAVERDAQAYKEKGY

SEQ ID NO: 438 - DNA, 57 bp, Artificial Sequence
  source: /note="Description of Artificial Sequence: Synthetic oligonucleotide"
gtgatcggcgccgccgccgtggagcgcgatgcccaggcctacaaggagaagggatac

SEQ ID NO: 439 - protein, 19 aa, Artificial Sequence
  source: /note="Description of Artificial Sequence: Synthetic peptide"
VIGFHCVAADVQLYKAKGY

SEQ ID NO: 440 - DNA, 57 bp, Artificial Sequence
  source: /note="Description of Artificial Sequence: Synthetic oligonucleotide"
gtgatcggcttccactgcgtggccgccgatgtgcagctgtacaaggccaagggatac

SEQ ID NO: 441 - protein, 17 aa, Unknown
  source: /note="Description of Unknown: Cas13d sequence"
DINLKKLEEKGFSSVTK

SEQ ID NO: 442 - DNA, 51 bp, Unknown
  source: /note="Description of Unknown: Cas13d sequence"
gacatcaacctgaagaagctggaggagaagggctttagctccgtgaccaag

SEQ ID NO: 443 - protein, 17 aa, Artificial Sequence
  source: /note="Description of Artificial Sequence: Synthetic peptide"
DINLAALEEAGFASVTA

SEQ ID NO: 444 - DNA, 51 bp, Artificial Sequence
  source: /note="Description of Artificial Sequence: Synthetic oligonucleotide"
gacatcaacctggccgccctggaggaggccggctttgcctccgtgaccgcc

SEQ ID NO: 445 - protein, 17 aa, Artificial Sequence
  source: /note="Description of Artificial Sequence: Synthetic peptide"
AINLKKLEEKAFSAVAK

SEQ ID NO: 446 - DNA, 51 bp, Artificial Sequence
  source: /note="Description of Artificial Sequence: Synthetic oligonucleotide"
gccatcaacctgaagaagctggaggagaaggcctttagcgccgtggccaag

SEQ ID NO: 447 - protein, 17 aa, Artificial Sequence
  source: /note="Description of Artificial Sequence: Synthetic peptide"
DIAAKKAEEKGFSSATK

SEQ ID NO: 448 - DNA, 51 bp, Artificial Sequence
  source: /note="Description of Artificial Sequence: Synthetic oligonucleotide"
gacatcgccgccaagaaggccgaggagaagggctttagctccgccaccaag

SEQ ID NO: 449 - protein, 17 aa, Artificial Sequence
  source: /note="Description of Artificial Sequence: Synthetic peptide"
DANLKKLAAKGASSVTK

SEQ ID NO: 450 - DNA, 51 bp, Artificial Sequence
  source: /note="Description of Artificial Sequence: Synthetic oligonucleotide"
gacgccaacctgaagaagctggccgccaagggcgccagctccgtgaccaag

SEQ ID NO: 451 - protein, 19 aa, Unknown
  source: /note="Description of Unknown: Cas13d sequence"
LCAGIDETAPDKRKDVEKE

SEQ ID NO: 452 - DNA, 57 bp, Unknown
  source: /note="Description of Unknown: Cas13d sequence"
ctgtgcgctggaatcgacgagacagcccccgacaagaggaaggatgtggagaaggag

SEQ ID NO: 453 - protein, 19 aa, Artificial Sequence
  source: /note="Description of Artificial Sequence: Synthetic peptide"
AAAGIDETAPDARADVEAE

SEQ ID NO: 454 - DNA, 57 bp, Artificial Sequence
  source: /note="Description of Artificial Sequence: Synthetic oligonucleotide"
gccgccgctggaatcgacgagacagcccccgacgccagggccgatgtggaggccgag

SEQ ID NO: 455 - protein, 19 aa, Artificial Sequence
  source: /note="Description of Artificial Sequence: Synthetic peptide"
LCAAIAEAAPAKRKAVEKE

SEQ ID NO: 456 - DNA, 57 bp, Artificial Sequence
  source: /note="Description of Artificial Sequence: Synthetic oligonucleotide"
ctgtgcgctgccatcgccgaggccgcccccgccaagaggaaggccgtggagaaggag

SEQ ID NO: 457 - protein, 19 aa, Artificial Sequence
  source: /note="Description of Artificial Sequence: Synthetic peptide"
LCAGADATAPDKRKDAAKE

SEQ ID NO: 458 - DNA, 57 bp, Artificial Sequence
  source: /note="Description of Artificial Sequence: Synthetic oligonucleotide"
ctgtgcgctggagccgacgccacagcccccgacaagaggaaggatgccgccaaggag

SEQ ID NO: 459 - protein, 19 aa, Artificial Sequence
  source: /note="Description of Artificial Sequence: Synthetic peptide"
LCVGIDETVPDKAKDVEKA

SEQ ID NO: 460 - DNA, 57 bp, Artificial Sequence
  source: /note="Description of Artificial Sequence: Synthetic oligonucleotide"
ctgtgcgtgggaatcgacgagacagtgcccgacaaggccaaggatgtggagaaggcc

SEQ ID NO: 461 - protein, 17 aa, Unknown
  source: /note="Description of Unknown: Cas13d sequence"
MAERAKESIDSLESANP

SEQ ID NO: 462 - DNA, 51 bp, Unknown
  source: /note="Description of Unknown: Cas13d sequence"
atggccgagagagctaaggagagcatcgactccctggagtctgctaaccct

SEQ ID NO: 463 - protein, 17 aa, Artificial Sequence
  source: /note="Description of Artificial Sequence: Synthetic peptide"
MAERAAEAIDALEAANP

SEQ ID NO: 464 - DNA, 51 bp, Artificial Sequence
  source: /note="Description of Artificial Sequence: Synthetic oligonucleotide"
atggccgagagagctgccgaggccatcgacgccctggaggccgctaaccct

SEQ ID NO: 465 - protein, 17 aa, Artificial Sequence
  source: /note="Description of Artificial Sequence: Synthetic peptide"
AAERAKESIASAESAAP

SEQ ID NO: 466 - DNA, 51 bp, Artificial Sequence
  source: /note="Description of Artificial Sequence: Synthetic oligonucleotide"
gccgccgagagagctaaggagagcatcgcctccgccgagtctgctgcccct

SEQ ID NO: 467 - protein, 17 aa, Artificial Sequence
  source: /note="Description of Artificial Sequence: Synthetic peptide"
MAARAKASADSLASANP

SEQ ID NO: 468 - DNA, 51 bp, Artificial Sequence
  source: /note="Description of Artificial Sequence: Synthetic oligonucleotide"
atggccgccagagctaaggccagcgccgactccctggcctctgctaaccct

SEQ ID NO: 469 - protein, 17 aa, Artificial Sequence
  source: /note="Description of Artificial Sequence: Synthetic peptide"
MVEAVKESIDSLESVNP

SEQ ID NO: 470 - DNA, 51 bp, Artificial Sequence
  source: /note="Description of Artificial Sequence: Synthetic oligonucleotide"
atggtggaggccgtgaaggagagcatcgactccctggagtctgtgaaccct

SEQ ID NO: 471 - protein, 19 aa, Unknown
  source: /note="Description of Unknown: Cas13d sequence"
KLYANYIKYSDEKKAEEFT

SEQ ID NO: 472 - DNA, 57 bp, Unknown
  source: /note="Description of Unknown: Cas13d sequence"
aagctgtacgccaactacatcaagtactccgatgagaagaaggccgaggagttcacc

SEQ ID NO: 473 - protein, 19 aa, Artificial Sequence
  source: /note="Description of Artificial Sequence: Synthetic peptide"
AAYANYIAYSDEAKAEEFT

SEQ ID NO: 474 - DNA, 57 bp, Artificial Sequence
  source: /note="Description of Artificial Sequence: Synthetic oligonucleotide"
gccgcctacgccaactacatcgcctactccgatgaggccaaggccgaggagttcacc

SEQ ID NO: 475 - protein, 19 aa, Artificial Sequence
  source: /note="Description of Artificial Sequence: Synthetic peptide"
KLYANYIKYAAEKAAEEFA

SEQ ID NO: 476 - DNA, 57 bp, Artificial Sequence
  source: /note="Description of Artificial Sequence: Synthetic oligonucleotide"
aagctgtacgccaactacatcaagtacgccgccgagaaggccgccgaggagttcgcc

SEQ ID NO: 477 - protein, 19 aa, Artificial Sequence
  source: /note="Description of Artificial Sequence: Synthetic peptide"
KLYAAYAKYSDAKKAEEAT

SEQ ID NO: 478 - DNA, 57 bp, Artificial Sequence
  source: /note="Description of Artificial Sequence: Synthetic oligonucleotide"
aagctgtacgccgcctacgccaagtactccgatgccaagaaggccgaggaggccacc

SEQ ID NO: 479 - protein, 19 aa, Artificial Sequence
  source: /note="Description of Artificial Sequence: Synthetic peptide"
KLYVNYIKYSDEKKVAAFT

SEQ ID NO: 480 - DNA, 57 bp, Artificial Sequence
  source: /note="Description of Artificial Sequence: Synthetic oligonucleotide"
aagctgtacgtgaactacatcaagtactccgatgagaagaaggtggccgccttcacc

SEQ ID NO: 481 - protein, 17 aa, Unknown
  source: /note="Description of Unknown: Cas13d sequence"
RQINREKAKTALNAYLR

SEQ ID NO: 482 - DNA, 51 bp, Unknown
  source: /note="Description of Unknown: Cas13d sequence"
aggcagatcaacagagagaaggccaagaccgctctgaacgcctacctgagg

SEQ ID NO: 483 - protein, 17 aa, Artificial Sequence
  source: /note="Description of Artificial Sequence: Synthetic peptide"
RQIAREAAAAALNAYLR

SEQ ID NO: 484 - DNA, 51 bp, Artificial Sequence
  source: /note="Description of Artificial Sequence: Synthetic oligonucleotide"
aggcagatcgccagagaggccgccgccgccgctctgaacgcctacctgagg

SEQ ID NO: 485 - protein, 17 aa, Artificial Sequence
  source: /note="Description of Artificial Sequence: Synthetic peptide"
RAINREKAKTAAAAYAR

SEQ ID NO: 486 - DNA, 51 bp, Artificial Sequence
  source: /note="Description of Artificial Sequence: Synthetic oligonucleotide"
agggccatcaacagagagaaggccaagaccgctgccgccgcctacgccagg

SEQ ID NO: 487 - protein, 17 aa, Artificial Sequence
  source: /note="Description of Artificial Sequence: Synthetic peptide"
RQANRAKVKTVLNAYLR

SEQ ID NO: 488 - DNA, 51 bp, Artificial Sequence
  source: /note="Description of Artificial Sequence: Synthetic oligonucleotide"
aggcaggccaacagagccaaggtgaagaccgtgctgaacgcctacctgagg

SEQ ID NO: 489 - protein, 17 aa, Artificial Sequence
  source: /note="Description of Artificial Sequence: Synthetic peptide"
AQINAEKAKTALNVYLA

SEQ ID NO: 490 - DNA, 51 bp, Artificial Sequence
  source: /note="Description of Artificial Sequence: Synthetic oligonucleotide"
gcccagatcaacgccgagaaggccaagaccgctctgaacgtgtacctggcc

SEQ ID NO: 491 - protein, 19 aa, Unknown
  source: /note="Description of Unknown: Cas13d sequence"
NTKWNVIIREDLLRIDNKT

SEQ ID NO: 492 - DNA, 57 bp, Unknown
  source: /note="Description of Unknown: Cas13d sequence"
aacacaaagtggaacgtgatcatccgggaggacctgctgcgcatcgataacaagacc

SEQ ID NO: 493 - protein, 19 aa, Artificial Sequence
  source: /note="Description of Artificial Sequence: Synthetic peptide"
AAAWNVIIREDLLRIDNAA

SEQ ID NO: 494 - DNA, 57 bp, Artificial Sequence
  source: /note="Description of Artificial Sequence: Synthetic oligonucleotide"
gccgccgcctggaacgtgatcatccgggaggacctgctgcgcatcgataacgccgcc

SEQ ID NO: 495 - protein, 19 aa, Artificial Sequence
  source: /note="Description of Artificial Sequence: Synthetic peptide"
NTKWAAIIREALLRIAAKT

SEQ ID NO: 496 - DNA, 57 bp, Artificial Sequence
  source: /note="Description of Artificial Sequence: Synthetic oligonucleotide"
aacacaaagtgggccgccatcatccgggaggccctgctgcgcatcgccgccaagacc

SEQ ID NO: 497 - protein, 19 aa, Artificial Sequence
  source: /note="Description of Artificial Sequence: Synthetic peptide"
NTKWNVAAREDAARADNKT

SEQ ID NO: 498 - DNA, 57 bp, Artificial Sequence
  source: /note="Description of Artificial Sequence: Synthetic oligonucleotide"
aacacaaagtggaacgtggccgcccgggaggacgccgcccgcgccgataacaagacc

SEQ ID NO: 499 - protein, 19 aa, Artificial Sequence
  source: /note="Description of Artificial Sequence: Synthetic peptide"
NTKANVIIAADLLAIDNKT

SEQ ID NO: 500 - DNA, 57 bp, Artificial Sequence
  source: /note="Description of Artificial Sequence: Synthetic oligonucleotide"
aacacaaaggccaacgtgatcatcgccgccgacctgctggccatcgataacaagacc

SEQ ID NO: 501 - protein, 17 aa, Unknown
  source: /note="Description of Unknown: Cas13d sequence"
CTLFRNKAVHLEVARYV

SEQ ID NO: 502 - DNA, 51 bp, Unknown
  source: /note="Description of Unknown: Cas13d sequence"
tgtacactgttccggaacaaggctgtgcacctggaggtggctcgctacgtg

SEQ ID NO: 503 - protein, 17 aa, Artificial Sequence
  source: /note="Description of Artificial Sequence: Synthetic peptide"
CAAFRNKAVHAEAARYA

SEQ ID NO: 504 - DNA, 51 bp, Artificial Sequence
  source: /note="Description of Artificial Sequence: Synthetic oligonucleotide"
tgtgccgccttccggaacaaggctgtgcacgccgaggccgctcgctacgcc

SEQ ID NO: 505 - protein, 17 aa, Artificial Sequence
  source: /note="Description of Artificial Sequence: Synthetic peptide"
ATLARNKAVHLAVVAYV

SEQ ID NO: 506 - DNA, 51 bp, Artificial Sequence
  source: /note="Description of Artificial Sequence: Synthetic oligonucleotide"
gccacactggcccggaacaaggctgtgcacctggccgtggtggcctacgtg

SEQ ID NO: 507 - protein, 19 aa, Unknown
  source: /note="Description of Unknown: Cas13d sequence"
HAYINDIAEVNSYFQLYHY

SEQ ID NO: 508 - DNA, 57 bp, Unknown
  source: /note="Description of Unknown: Cas13d sequence"
cacgcctacatcaacgacatcgccgaggtgaactcctactttcagctgtaccactac

SEQ ID NO: 509 - protein, 19 aa, Artificial Sequence
  source: /note="Description of Artificial Sequence: Synthetic peptide"
AVYIAAIAEVNAYFQLYHY

SEQ ID NO: 510 - DNA, 57 bp, Artificial Sequence
  source: /note="Description of Artificial Sequence: Synthetic oligonucleotide"
gccgtgtacatcgccgccatcgccgaggtgaacgcctactttcagctgtaccactac

SEQ ID NO: 511 - protein, 19 aa, Artificial Sequence
  source: /note="Description of Artificial Sequence: Synthetic peptide"
HAYINDIAEAASYFAAYAY

SEQ ID NO: 512 - DNA, 57 bp, Artificial Sequence
  source: /note="Description of Artificial Sequence: Synthetic oligonucleotide"
cacgcctacatcaacgacatcgccgaggccgcctcctactttgccgcctacgcctac

SEQ ID NO: 513 - protein, 19 aa, Artificial Sequence
  source: /note="Description of Artificial Sequence: Synthetic peptide"
HAYANDAVAVNSYAQLYHY

SEQ ID NO: 514 - DNA, 57 bp, Artificial Sequence
  source: /note="Description of Artificial Sequence: Synthetic oligonucleotide"
cacgcctacgccaacgacgccgtggccgtgaactcctacgcccagctgtaccactac

SEQ ID NO: 515 - protein, 17 aa, Unknown
  source: /note="Description of Unknown: Cas13d sequence"
IMQRIIMNERYEKSSGK

SEQ ID NO: 516 - DNA, 51 bp, Unknown
  source: /note="Description of Unknown: Cas13d sequence"
atcatgcagaggatcatcatgaacgagagatacgagaagtctagcggcaag

SEQ ID NO: 517 - protein, 17 aa, Artificial Sequence
  source: /note="Description of Artificial Sequence: Synthetic peptide"
IMQRIIMNERYEAAAGA

SEQ ID NO: 518 - DNA, 51 bp, Artificial Sequence
  source: /note="Description of Artificial Sequence: Synthetic oligonucleotide"
atcatgcagaggatcatcatgaacgagagatacgaggccgccgccggcgcc

SEQ ID NO: 519 - protein, 17 aa, Artificial Sequence
  source: /note="Description of Artificial Sequence: Synthetic peptide"
IAARIIMAERYEKSSAK

SEQ ID NO: 520 - DNA, 51 bp, Artificial Sequence
  source: /note="Description of Artificial Sequence: Synthetic oligonucleotide"
atcgccgccaggatcatcatggccgagagatacgagaagtctagcgccaag

SEQ ID NO: 521 - protein, 17 aa, Artificial Sequence
  source: /note="Description of Artificial Sequence: Synthetic peptide"
AMQRAAANERYEKSSGK

SEQ ID NO: 522 - DNA, 51 bp, Artificial Sequence
  source: /note="Description of Artificial Sequence: Synthetic oligonucleotide"
gccatgcagagggccgccgccaacgagagatacgagaagtctagcggcaag

SEQ ID NO: 523 - protein, 17 aa, Artificial Sequence
  source: /note="Description of Artificial Sequence: Synthetic peptide"
IMQAIIMNAAYAKSSGK

SEQ ID NO: 524 - DNA, 51 bp, Artificial Sequence
  source: /note="Description of Artificial Sequence: Synthetic oligonucleotide"
atcatgcaggccatcatcatgaacgccgcctacgccaagtctagcggcaag

SEQ ID NO: 525 - protein, 17 aa, Artificial Sequence
  source: /note="Description of Artificial Sequence: Synthetic peptide"
IMQRIIMNERAEKSSGK

SEQ ID NO: 526 - DNA, 51 bp, Artificial Sequence
  source: /note="Description of Artificial Sequence: Synthetic oligonucleotide"
atcatgcagaggatcatcatgaacgagagagccgagaagtctagcggcaag

SEQ ID NO: 527 - protein, 19 aa, Unknown
  source: /note="Description of Unknown: Cas13d sequence"
VSEYFDAVNDEKKYNDRLL

SEQ ID NO: 528 - DNA, 57 bp, Unknown
  source: /note="Description of Unknown: Cas13d sequence"
gtgtctgagtacttcgacgccgtgaacgatgagaagaagtacaacgatagactgctg

SEQ ID NO: 529 - protein, 19 aa, Artificial Sequence
  source: /note="Description of Artificial Sequence: Synthetic peptide"
AAEYFAAVNDEAAYNDRLL

SEQ ID NO: 530 - DNA, 57 bp, Artificial Sequence
  source: /note="Description of Artificial Sequence: Synthetic oligonucleotide"
gccgccgagtacttcgccgccgtgaacgatgaggccgcctacaacgatagactgctg

SEQ ID NO: 531 - protein, 19 aa, Artificial Sequence
  source: /note="Description of Artificial Sequence: Synthetic peptide"
VSEYFDAVAAEKKYAARLL

SEQ ID NO: 532 - DNA, 57 bp, Artificial Sequence
  source: /note="Description of Artificial Sequence: Synthetic oligonucleotide"
gtgtctgagtacttcgacgccgtggccgccgagaagaagtacgccgccagactgctg

SEQ ID NO: 533 - protein, 19 aa, Artificial Sequence
  source: /note="Description of Artificial Sequence: Synthetic peptide"
VSEYADAANDEKKYNDRAA

SEQ ID NO: 534 - DNA, 57 bp, Artificial Sequence
  source: /note="Description of Artificial Sequence: Synthetic oligonucleotide"
gtgtctgagtacgccgacgccgccaacgatgagaagaagtacaacgatagagccgcc

SEQ ID NO: 535 - protein, 19 aa, Artificial Sequence
  source: /note="Description of Artificial Sequence: Synthetic peptide"
VSAYFDVVNDAKKYNDALL

SEQ ID NO: 536 - DNA, 57 bp, Artificial Sequence
  source: /note="Description of Artificial Sequence: Synthetic oligonucleotide"
gtgtctgcctacttcgacgtggtgaacgatgccaagaagtacaacgatgccctgctg

SEQ ID NO: 537 - protein, 19 aa, Artificial Sequence
  source: /note="Description of Artificial Sequence: Synthetic peptide"
VSEAFDAVNDEKKYNDRLL

SEQ ID NO: 538 - DNA, 57 bp, Artificial Sequence
  source: /note="Description of Artificial Sequence: Synthetic oligonucleotide"
gtgtctgaggccttcgacgccgtgaacgatgagaagaagtacaacgatagactgctg

SEQ ID NO: 539 - protein, 19 aa, Artificial Sequence
  source: /note="Description of Artificial Sequence: Synthetic peptide"
VSEYFDAVNDEKKANDRLL

SEQ ID NO: 540 - DNA, 57 bp, Artificial Sequence
  source: /note="Description of Artificial Sequence: Synthetic oligonucleotide"
gtgtctgagtacttcgacgccgtgaacgatgagaagaaggccaacgatagactgctg

SEQ ID NO: 541 - protein, 17 aa, Unknown
  source: /note="Description of Unknown: Cas13d sequence"
KLLCVPFGYCIPRFKNL

SEQ ID NO: 542 - DNA, 51 bp, Unknown
  source: /note="Description of Unknown: Cas13d sequence"
aagctgctgtgcgtgcctttcggatactgtatcccacggtttaagaacctg

SEQ ID NO: 543 - protein, 17 aa, Artificial Sequence
  source: /note="Description of Artificial Sequence: Synthetic peptide"
ALLCAPFAYCIPRFAAL

SEQ ID NO: 544 - DNA, 51 bp, Artificial Sequence
  source: /note="Description of Artificial Sequence: Synthetic oligonucleotide"
gccctgctgtgcgcccctttcgcctactgtatcccacggtttgccgccctg

SEQ ID NO: 545 - protein, 17 aa, Artificial Sequence
  source: /note="Description of Artificial Sequence: Synthetic peptide"
KAAAVPFGYAIPRFKNA

SEQ ID NO: 546 - DNA, 51 bp, Artificial Sequence
  source: /note="Description of Artificial Sequence: Synthetic oligonucleotide"
aaggccgccgccgtgcctttcggatacgccatcccacggtttaagaacgcc

SEQ ID NO: 547 - protein, 17 aa, Artificial Sequence
  source: /note="Description of Artificial Sequence: Synthetic peptide"
KLLCVPAGYCAPAAKNL

SEQ ID NO: 548 - DNA, 51 bp, Artificial Sequence
  source: /note="Description of Artificial Sequence: Synthetic oligonucleotide"
aagctgctgtgcgtgcctgccggatactgtgccccagccgccaagaacctg

SEQ ID NO: 549 - protein, 17 aa, Artificial Sequence
  source: /note="Description of Artificial Sequence: Synthetic peptide"
KLLCVPFGACIPRFKNL

SEQ ID NO: 550 - DNA, 51 bp, Artificial Sequence
  source: /note="Description of Artificial Sequence: Synthetic oligonucleotide"
aagctgctgtgcgtgcctttcggagcctgtatcccacggtttaagaacctg

SEQ ID NO: 551 - protein, 19 aa, Unknown
  source: /note="Description of Unknown: Cas13d sequence"
SIEALFDRNEAAKFDKEKK

SEQ ID NO: 552 - DNA, 57 bp, Unknown
  source: /note="Description of Unknown: Cas13d sequence"
agcatcgaggccctgttcgaccgcaacgaggctgccaagtttgataaggagaagaag

SEQ ID NO: 553 - protein, 19 aa, Artificial Sequence
  source: /note="Description of Artificial Sequence: Synthetic peptide"
AAEALFDRNEAAAFDAEAK

SEQ ID NO: 554 - DNA, 57 bp, Artificial Sequence
  source: /note="Description of Artificial Sequence: Synthetic oligonucleotide"
gccgccgaggccctgttcgaccgcaacgaggctgccgcctttgatgccgaggccaag

SEQ ID NO: 555 - protein, 19 aa, Artificial Sequence
  source: /note="Description of Artificial Sequence: Synthetic peptide"
SIEAAFARAEAAKFAKEKA

SEQ ID NO: 556 - DNA, 57 bp, Artificial Sequence
  source: /note="Description of Artificial Sequence: Synthetic oligonucleotide"
agcatcgaggccgccttcgcccgcgccgaggctgccaagtttgccaaggagaaggcc

SEQ ID NO: 557 - protein, 19 aa, Artificial Sequence
  source: /note="Description of Artificial Sequence: Synthetic peptide"
SIAALADRNAAAKADKAKK

SEQ ID NO: 558 - DNA, 57 bp, Artificial Sequence
  source: /note="Description of Artificial Sequence: Synthetic oligonucleotide"
agcatcgccgccctggccgaccgcaacgccgctgccaaggccgataaggccaagaag

SEQ ID NO: 559 - protein, 19 aa, Artificial Sequence
  source: /note="Description of Artificial Sequence: Synthetic peptide"
SIEVLFDANEVVKFDKEKK

SEQ ID NO: 560 - DNA, 57 bp, Artificial Sequence
  source: /note="Description of Artificial Sequence: Synthetic oligonucleotide"
agcatcgaggtgctgttcgacgccaacgaggtggtgaagtttgataaggagaagaag

SEQ ID NO: 561 - protein, 17 aa, Unknown
  source: /note="Description of Unknown: Cas13d sequence"
ILAEYITNAAYAVNNIS

SEQ ID NO: 562 - DNA, 51 bp, Unknown
  source: /note="Description of Unknown: Cas13d sequence"
atcctggctgagtacatcacaaacgccgcttacgccgtgaacaacatctcc

SEQ ID NO: 563 - protein, 17 aa, Artificial Sequence
  source: /note="Description of Artificial Sequence: Synthetic peptide"
ALAEYITNAAYAVNNIS

SEQ ID NO: 564 - DNA, 51 bp, Artificial Sequence
  source: /note="Description of Artificial Sequence: Synthetic oligonucleotide"
gccctggctgagtacatcacaaacgccgcttacgccgtgaacaacatctcc

SEQ ID NO: 565 - protein, 17 aa, Artificial Sequence
  source: /note="Description of Artificial Sequence: Synthetic peptide"
IAAEYITNAAYAVNNIS

SEQ ID NO: 566 - DNA, 51 bp, Artificial Sequence
  source: /note="Description of Artificial Sequence: Synthetic oligonucleotide"
atcgccgctgagtacatcacaaacgccgcttacgccgtgaacaacatctcc

SEQ ID NO: 567 - protein, 17 aa, Artificial Sequence
  source: /note="Description of Artificial Sequence: Synthetic peptide"
ILVEYITNAAYAVNNIS

SEQ ID NO: 568 - DNA, 51 bp, Artificial Sequence
  source: /note="Description of Artificial Sequence: Synthetic oligonucleotide"
atcctggccgagtacatcacaaacgccgcttacgccgtgaacaacatctcc

SEQ ID NO: 569 - protein, 17 aa, Artificial Sequence
  source: /note="Description of Artificial Sequence: Synthetic peptide"
ILAAYITNAAYAVNNIS

SEQ ID NO: 570 - DNA, 51 bp, Artificial Sequence
  source: /note="Description of Artificial Sequence: Synthetic oligonucleotide"
atcctggctgcctacatcacaaacgccgcttacgccgtgaacaacatctcc

SEQ ID NO: 571 - protein, 17 aa, Artificial Sequence
  source: /note="Description of Artificial Sequence: Synthetic peptide"
ILAEYATNAAYAVNNIS

SEQ ID NO: 572 - DNA, 51 bp, Artificial Sequence
  source: /note="Description of Artificial Sequence: Synthetic oligonucleotide"
atcctggctgagtacgccacaaacgccgcttacgccgtgaacaacatctcc

SEQ ID NO: 573 - protein, 17 aa, Artificial Sequence
  source: /note="Description of Artificial Sequence: Synthetic peptide"
ILAEYIANAAYAVNNIS

SEQ ID NO: 574 - DNA, 51 bp, Artificial Sequence
  source: /note="Description of Artificial Sequence: Synthetic oligonucleotide"
atcctggctgagtacatcgccaacgccgcttacgccgtgaacaacatctcc

SEQ ID NO: 575 - protein, 17 aa, Artificial Sequence
  source: /note="Description of Artificial Sequence: Synthetic peptide"
ILAEYITAAAYAVNNIS

SEQ ID NO: 576 - DNA, 51 bp, Artificial Sequence
  source: /note="Description of Artificial Sequence: Synthetic oligonucleotide"
atcctggctgagtacatcacagccgccgcttacgccgtgaacaacatctcc

SEQ ID NO: 577 - protein, 17 aa, Artificial Sequence
  source: /note="Description of Artificial Sequence: Synthetic peptide"
ILAEYITNVAYAVNNIS

SEQ ID NO: 578 - DNA, 51 bp, Artificial Sequence
  source: /note="Description of Artificial Sequence: Synthetic oligonucleotide"
atcctggctgagtacatcacaaacgtggcttacgccgtgaacaacatctcc

SEQ ID NO: 579 - protein, 17 aa, Artificial Sequence
  source: /note="Description of Artificial Sequence: Synthetic peptide"
ILAEYITNAVYAVNNIS

SEQ ID NO: 580 - DNA, 51 bp, Artificial Sequence
  source: /note="Description of Artificial Sequence: Synthetic oligonucleotide"
atcctggctgagtacatcacaaacgccgtgtacgccgtgaacaacatctcc

SEQ ID NO: 581 - protein, 17 aa, Artificial Sequence
  source: /note="Description of Artificial Sequence: Synthetic peptide"
ILAEYITNAAYVVNNIS

SEQ ID NO: 582 - DNA, 51 bp, Artificial Sequence
  source: /note="Description of Artificial Sequence: Synthetic oligonucleotide"
atcctggctgagtacatcacaaacgccgcttacgtggtgaacaacatctcc

SEQ ID NO: 583 - protein, 17 aa, Artificial Sequence
  source: /note="Description of Artificial Sequence: Synthetic peptide"
ILAEYITNAAYAANNIS

SEQ ID NO: 584 - DNA, 51 bp, Artificial Sequence
  source: /note="Description of Artificial Sequence: Synthetic oligonucleotide"
atcctggctgagtacatcacaaacgccgcttacgccgccaacaacatctcc

SEQ ID NO: 585 - protein, 17 aa, Artificial Sequence
  source: /note="Description of Artificial Sequence: Synthetic peptide"
ILAEYITNAAYAVANIS

SEQ ID NO: 586 - DNA, 51 bp, Artificial Sequence
  source: /note="Description of Artificial Sequence: Synthetic oligonucleotide"
atcctggctgagtacatcacaaacgccgcttacgccgtggccaacatctcc

SEQ ID NO: 587 - protein, 17 aa, Artificial Sequence
  source: /note="Description of Artificial Sequence: Synthetic peptide"
ILAEYITNAAYAVNAIS

SEQ ID NO: 588 - DNA, 51 bp, Artificial Sequence
  source: /note="Description of Artificial Sequence: Synthetic oligonucleotide"
atcctggctgagtacatcacaaacgccgcttacgccgtgaacgccatctcc

SEQ ID NO: 589 - protein, 17 aa, Artificial Sequence
  source: /note="Description of Artificial Sequence: Synthetic peptide"
ILAEYITNAAYAVNNAS

SEQ ID NO: 590 - DNA, 51 bp, Artificial Sequence
  source: /note="Description of Artificial Sequence: Synthetic oligonucleotide"
atcctggctgagtacatcacaaacgccgcttacgccgtgaacaacgcctcc

SEQ ID NO: 591 - protein, 17 aa, Artificial Sequence
  source: /note="Description of Artificial Sequence: Synthetic peptide"
ILAEYITNAAYAVNNIA

SEQ ID NO: 592 - DNA, 51 bp, Artificial Sequence
  source: /note="Description of Artificial Sequence: Synthetic oligonucleotide"
atcctggctgagtacatcacaaacgccgcttacgccgtgaacaacatcgcc

SEQ ID NO: 593 - protein, 17 aa, Artificial Sequence
  source: /note="Description of Artificial Sequence: Synthetic peptide"
ALAAYATNAAYAVNNIS

SEQ ID NO: 594 - DNA, 51 bp, Artificial Sequence
  source: /note="Description of Artificial Sequence: Synthetic oligonucleotide"
gccctggctgcctacgccacaaacgccgcttacgccgtgaacaacatctcc

SEQ ID NO: 595 - protein, 17 aa, Artificial Sequence
  source: /note="Description of Artificial Sequence: Synthetic peptide"
ALAAYITNAAYAVNNAS

SEQ ID NO: 596 - DNA, 51 bp, Artificial Sequence
  source: /note="Description of Artificial Sequence: Synthetic oligonucleotide"
gccctggctgcctacatcacaaacgccgcttacgccgtgaacaacgcctcc

SEQ ID NO: 597 - protein, 17 aa, Artificial Sequence
  source: /note="Description of Artificial Sequence: Synthetic peptide"
ALAEYATNAAYAVNNAS

SEQ ID NO: 598 - DNA, 51 bp, Artificial Sequence
  source: /note="Description of Artificial Sequence: Synthetic oligonucleotide"
gccctggctgagtacgccacaaacgccgcttacgccgtgaacaacgcctcc

SEQ ID NO: 599 - protein, 17 aa, Artificial Sequence
  source: /note="Description of Artificial Sequence: Synthetic peptide"
ILAAYATNAAYAVNNAS

SEQ ID NO: 600 - DNA, 51 bp, Artificial Sequence
  source: /note="Description of Artificial Sequence: Synthetic oligonucleotide"
atcctggctgcctacgccacaaacgccgcttacgccgtgaacaacgcctcc

SEQ ID NO: 601 - protein, 17 aa, Artificial Sequence
  source: /note="Description of Artificial Sequence: Synthetic peptide"
ALAAYITNAAYAVNNIS

SEQ ID NO: 602 - DNA, 51 bp, Artificial Sequence
  source: /note="Description of Artificial Sequence: Synthetic oligonucleotide"
gccctggctgcctacatcacaaacgccgcttacgccgtgaacaacatctcc

SEQ ID NO: 603 - protein, 17 aa, Artificial Sequence
  source: /note="Description of Artificial Sequence: Synthetic peptide"
ALAEYATNAAYAVNNIS

SEQ ID NO: 604 - DNA, 51 bp, Artificial Sequence
  source: /note="Description of Artificial Sequence: Synthetic oligonucleotide"
gccctggctgagtacgccacaaacgccgcttacgccgtgaacaacatctcc

SEQ ID NO: 605 - protein, 17 aa, Artificial Sequence
  source: /note="Description of Artificial Sequence: Synthetic peptide"
ALAEYITNAAYAVNNAS

SEQ ID NO: 606 - DNA, 51 bp, Artificial Sequence
  source: /note="Description of Artificial Sequence: Synthetic oligonucleotide"
gccctggctgagtacatcacaaacgccgcttacgccgtgaacaacgcctcc

SEQ ID NO: 607 - protein, 17 aa, Artificial Sequence
  source: /note="Description of Artificial Sequence: Synthetic peptide"
ILAAYATNAAYAVNNIS

SEQ ID NO: 608 - DNA, 51 bp, Artificial Sequence
  source: /note="Description of Artificial Sequence: Synthetic oligonucleotide"
atcctggctgcctacgccacaaacgccgcttacgccgtgaacaacatctcc

SEQ ID NO: 609 - protein, 17 aa, Artificial Sequence
  source: /note="Description of Artificial Sequence: Synthetic peptide"
ILAAYITNAAYAVNNAS

SEQ ID NO: 610 - DNA, 51 bp, Artificial Sequence
  source: /note="Description of Artificial Sequence: Synthetic oligonucleotide"
atcctggctgcctacatcacaaacgccgcttacgccgtgaacaacgcctcc

SEQ ID NO: 611 - protein, 17 aa, Artificial Sequence
  source: /note="Description of Artificial Sequence: Synthetic peptide"
ILAEYATNAAYAVNNAS

SEQ ID NO: 612 - DNA, 51 bp, Artificial Sequence
  source: /note="Description of Artificial Sequence: Synthetic oligonucleotide"
atcctggctgagtacgccacaaacgccgcttacgccgtgaacaacgcctcc

SEQ ID NO: 613 - protein, 17 aa, Artificial Sequence
  source: /note="Description of Artificial Sequence: Synthetic peptide"
ILVEYITNVVYAVNNIS

SEQ ID NO: 614 - DNA, 51 bp, Artificial Sequence
  source: /note="Description of Artificial Sequence: Synthetic oligonucleotide"
atcctggtggagtacatcacaaacgtggtgtacgccgtgaacaacatctcc

SEQ ID NO: 615 - protein, 17 aa, Artificial Sequence
  source: /note="Description of Artificial Sequence: Synthetic peptide"
ILVEYITNVAYVVNNIS

SEQ ID NO: 616 - DNA, 51 bp, Artificial Sequence
  source: /note="Description of Artificial Sequence: Synthetic oligonucleotide"
atcctggtggagtacatcacaaacgtggcttacgtggtgaacaacatctcc

SEQ ID NO: 617 - protein, 17 aa, Artificial Sequence
  source: /note="Description of Artificial Sequence: Synthetic peptide"
ILVEYITNAVYVVNNIS

SEQ ID NO: 618 - DNA, 51 bp, Artificial Sequence
  source: /note="Description of Artificial Sequence: Synthetic oligonucleotide"
atcctggtggagtacatcacaaacgccgtgtacgtggtgaacaacatctcc

SEQ ID NO: 619 - protein, 17 aa, Artificial Sequence
  source: /note="Description of Artificial Sequence: Synthetic peptide"
ILAEYITNVVYVVNNIS

SEQ ID NO: 620 - DNA, 51 bp, Artificial Sequence
  source: /note="Description of Artificial Sequence: Synthetic oligonucleotide"
atcctggctgagtacatcacaaacgtggtgtacgtggtgaacaacatctcc

SEQ ID NO: 621 - protein, 17 aa, Artificial Sequence
  source: /note="Description of Artificial Sequence: Synthetic peptide"
ILVEYITNVAYAVNNIS

SEQ ID NO: 622 - DNA, 51 bp, Artificial Sequence
  source: /note="Description of Artificial Sequence: Synthetic oligonucleotide"
atcctggtggagtacatcacaaacgtggcttacgccgtgaacaacatctcc

SEQ ID NO: 623 - protein, 17 aa, Artificial Sequence
  source: /note="Description of Artificial Sequence: Synthetic peptide"
ILVEYITNAVYAVNNIS

SEQ ID NO: 624 - DNA, 51 bp, Artificial Sequence
  source: /note="Description of Artificial Sequence: Synthetic oligonucleotide"
atcctggtggagtacatcacaaacgccgtgtacgccgtgaacaacatctcc

SEQ ID NO: 625 - protein, 17 aa, Artificial Sequence
  source: /note="Description of Artificial Sequence: Synthetic peptide"
ILVEYITNAAYVVNNIS

SEQ ID NO: 626 - DNA, 51 bp, Artificial Sequence
  source: /note="Description of Artificial Sequence: Synthetic oligonucleotide"
atcctggtggagtacatcacaaacgccgcttacgtggtgaacaacatctcc

SEQ ID NO: 627 - protein, 17 aa, Artificial Sequence
  source: /note="Description of Artificial Sequence: Synthetic peptide"
ILAEYITNVVYAVNNIS

SEQ ID NO: 628 - DNA, 51 bp, Artificial Sequence
  source: /note="Description of Artificial Sequence: Synthetic oligonucleotide"
atcctggctgagtacatcacaaacgtggtgtacgccgtgaacaacatctcc

SEQ ID NO: 629 - protein, 17 aa, Artificial Sequence
  source: /note="Description of Artificial Sequence: Synthetic peptide"
ILAEYITNVAYVVNNIS

SEQ ID NO: 630 - DNA, 51 bp, Artificial Sequence
  source: /note="Description of Artificial Sequence: Synthetic oligonucleotide"
atcctggctgagtacatcacaaacgtggcttacgtggtgaacaacatctcc

SEQ ID NO: 631 - protein, 17 aa, Artificial Sequence
  source: /note="Description of Artificial Sequence: Synthetic peptide"
ILAEYITNAVYVVNNIS

SEQ ID NO: 632 - DNA, 51 bp, Artificial Sequence
  source: /note="Description of Artificial Sequence: Synthetic oligonucleotide"
atcctggctgagtacatcacaaacgccgtgtacgtggtgaacaacatctcc

SEQ ID NO: 633 - protein, 17 aa, Artificial Sequence
  source: /note="Description of Artificial Sequence: Synthetic peptide"
ALAAYITNAAYVVNNIS

SEQ ID NO: 634 - DNA, 51 bp, Artificial Sequence
  source: /note="Description of Artificial Sequence: Synthetic oligonucleotide"
gccctggctgcctacatcacaaacgccgcttacgtggtgaacaacatctcc

SEQ ID NO: 635 - protein, 17 aa, Artificial Sequence
  source: /note="Description of Artificial Sequence: Synthetic peptide"
ALVAYITNAAYVVNNIS

SEQ ID NO: 636 - DNA, 51 bp, Artificial Sequence
  source: /note="Description of Artificial Sequence: Synthetic oligonucleotide"
gccctggtggcctacatcacaaacgccgcttacgtggtgaacaacatctcc

SEQ ID NO: 637 - protein, 18 aa, Unknown
  source: /note="Description of Unknown: Cas13e sequence"
RTIMERAYERAIFECRRR

SEQ ID NO: 638 - DNA, 54 bp, Unknown
  source: /note="Description of Unknown: Cas13e sequence"
cggaccatcatggagagagcctatgagcgggccatcttcgagtgcagaagaaga

SEQ ID NO: 639 - protein, 18 aa, Artificial Sequence
  source: /note="Description of Artificial Sequence: Synthetic peptide"
ATIMEAAYEAAIFECAAR

SEQ ID NO: 640 - DNA, 54 bp, Artificial Sequence
  source: /note="Description of Artificial Sequence: Synthetic oligonucleotide"
gccaccatcatggaggccgcctatgaggccgccatcttcgagtgcgccgccaga

SEQ ID NO: 641 - protein, 18 aa, Artificial Sequence
  source: /note="Description of Artificial Sequence: Synthetic peptide"
RTIMARAYARAIFECRRA

SEQ ID NO: 642 - DNA, 54 bp, Artificial Sequence
  source: /note="Description of Artificial Sequence: Synthetic oligonucleotide"
cggaccatcatggccagagcctatgcccgggccatcttcgcctgcagaagagcc

SEQ ID NO: 643 - protein, 18 aa, Artificial Sequence
  source: /note="Description of Artificial Sequence: Synthetic peptide"
RAIMERAYERAIFEARRR

SEQ ID NO: 644 - DNA, 54 bp, Artificial Sequence
  source: /note="Description of Artificial Sequence: Synthetic oligonucleotide"
cgggccatcgccgagagagcctatgagcgggccatcgccgaggccagaagaaga

SEQ ID NO: 645 - protein, 18 aa, Artificial Sequence
  source: /note="Description of Artificial Sequence: Synthetic peptide"
RTAMERVYERVAFECRRR

SEQ ID NO: 646 - DNA, 54 bp, Artificial Sequence
  source: /note="Description of Artificial Sequence: Synthetic oligonucleotide"
cggaccgccatggagagagtgtatgagcgggtggccttcgagtgcagaagaaga

SEQ ID NO: 647 - protein, 18 aa, Artificial Sequence
  source: /note="Description of Artificial Sequence: Synthetic peptide"
RTIMERAAERAIFECRRR

SEQ ID NO: 648 - DNA, 54 bp, Artificial Sequence
  source: /note="Description of Artificial Sequence: Synthetic oligonucleotide"
cggaccatcatggagagagccgccgagcgggccatcttcgagtgcagaagaaga

SEQ ID NO: 649 - protein, 16 aa, Unknown
  source: /note="Description of Unknown: Cas13e sequence"
AFEEKVVKAKKMSEKE

SEQ ID NO: 650 - DNA, 48 bp, Unknown
  source: /note="Description of Unknown: Cas13e sequence"
gctttcgaagagaaggtggtgaaggccaagaagatgagcgagaaggaa

SEQ ID NO: 651 - protein, 16 aa, Artificial Sequence
  source: /note="Description of Artificial Sequence: Synthetic peptide"
AFEEAVVAAAAMSEKE

SEQ ID NO: 652 - DNA, 48 bp, Artificial Sequence
  source: /note="Description of Artificial Sequence: Synthetic oligonucleotide"
gctttcgaagaggccgtggtggccgccgccgccatgagcgagaaggaa

SEQ ID NO: 653 - protein, 16 aa, Artificial Sequence
  source: /note="Description of Artificial Sequence: Synthetic peptide"
AFAAKVVKAKKMSAAE

SEQ ID NO: 654 - DNA, 48 bp, Artificial Sequence
  source: /note="Description of Artificial Sequence: Synthetic oligonucleotide"
gctttcgccgccaaggtggtgaaggccaagaagatgagcgccgccgaa

SEQ ID NO: 655 - protein, 16 aa, Artificial Sequence
  source: /note="Description of Artificial Sequence: Synthetic peptide"
AAEEKVVKAKKAAEKA

SEQ ID NO: 656 - DNA, 48 bp, Artificial Sequence
  source: /note="Description of Artificial Sequence: Synthetic oligonucleotide"
gctgccgaagagaaggtggtgaaggccaagaaggccgccgagaaggcc

SEQ ID NO: 657 - protein, 16 aa, Artificial Sequence
  source: /note="Description of Artificial Sequence: Synthetic peptide"
VFEEKAAKVKKMSEKE

SEQ ID NO: 658 - DNA, 48 bp, Artificial Sequence
  source: /note="Description of Artificial Sequence: Synthetic oligonucleotide"
gtgttcgaagagaaggccgccaaggtgaagaagatgagcgagaaggaa

SEQ ID NO: 659 - protein, 16 aa, Unknown
  source: /note="Description of Unknown: Cas13e sequence"
VMKKYGIEKEWKFPVK

SEQ ID NO: 660 - DNA, 48 bp, Unknown
  source: /note="Description of Unknown: Cas13e sequence"
gtgatgaagaagtacggcatcgagaaggaatggaagttccctgtcaag

SEQ ID NO: 661 - protein, 16 aa, Artificial Sequence
  source: /note="Description of Artificial Sequence: Synthetic peptide"
VMAAYGIEAEWAFPVA

SEQ ID NO: 662 - DNA, 48 bp, Artificial Sequence
  source: /note="Description of Artificial Sequence: Synthetic oligonucleotide"
gtgatggccgcctacggcatcgaggccgaatgggccttccctgtcgcc

SEQ ID NO: 663 - protein, 16 aa, Artificial Sequence
  source: /note="Description of Artificial Sequence: Synthetic peptide"
VAKKYGIAKAWKAAVK

SEQ ID NO: 664 - DNA, 48 bp, Artificial Sequence
  source: /note="Description of Artificial Sequence: Synthetic oligonucleotide"
gtggccaagaagtacggcatcgccaaggcctggaaggccgccgtcaag

SEQ ID NO: 665 - protein, 16 aa, Artificial Sequence
  source: /note="Description of Artificial Sequence: Synthetic peptide"
AMKKYAAEKEAKFPAK

SEQ ID NO: 666 - DNA, 48 bp, Artificial Sequence
  source: /note="Description of Artificial Sequence: Synthetic oligonucleotide"
gccatgaagaagtacgccgccgagaaggaagccaagttccctgccaag

SEQ ID NO: 667 - protein, 16 aa, Artificial Sequence
  source: /note="Description of Artificial Sequence: Synthetic peptide"
VMKKAGIEKEWKFPVK

SEQ ID NO: 668 - DNA, 48 bp, Artificial Sequence
  source: /note="Description of Artificial Sequence: Synthetic oligonucleotide"
gtgatgaagaaggccggcatcgagaaggaatggaagttccctgtcaag

SEQ ID NO: 669 - protein, 16 aa, Unknown
  source: /note="Description of Unknown: Cas13e sequence"
QVSKQTSKKRELSIDE

SEQ ID NO: 670 - DNA, 48 bp, Unknown
  source: /note="Description of Unknown: Cas13e sequence"
caggtgagcaagcagacctccaagaagagggagctgagcatcgacgag

SEQ ID NO: 671 - protein, 16 aa, Artificial Sequence
  source: /note="Description of Artificial Sequence: Synthetic peptide"
QVSAQTSAAAELSIDE

SEQ ID NO: 672 - DNA, 48 bp, Artificial Sequence
  source: /note="Description of Artificial Sequence: Synthetic oligonucleotide"
caggtgagcgcccagacctccgccgccgccgagctgagcatcgacgag

SEQ ID NO: 673 - protein, 16 aa, Artificial Sequence
  source: /note="Description of Artificial Sequence: Synthetic peptide"
QVAKQTSKKRALSIAA

SEQ ID NO: 674 - DNA, 48 bp, Artificial Sequence
  source: /note="Description of Artificial Sequence: Synthetic oligonucleotide"
caggtggccaagcagacctccaagaagagggccctgagcatcgccgcc

SEQ ID NO: 675 - protein, 16 aa, Artificial Sequence
  source: /note="Description of Artificial Sequence: Synthetic peptide"
AVSKQAAKKRELAIDE

SEQ ID NO: 676 - DNA, 48 bp, Artificial Sequence
  source: /note="Description of Artificial Sequence: Synthetic oligonucleotide"
gccgtgagcaagcaggccgccaagaagagggagctggccatcgacgag

SEQ ID NO: 677 - protein, 16 aa, Artificial Sequence
  source: /note="Description of Artificial Sequence: Synthetic peptide"
QASKATSKKREASADE

SEQ ID NO: 678 - DNA, 48 bp, Artificial Sequence
  source: /note="Description of Artificial Sequence: Synthetic oligonucleotide"
caggccagcaaggccacctccaagaagagggaggccagcgccgacgag

SEQ ID NO: 679 - protein, 16 aa, Unknown
  source: /note="Description of Unknown: Cas13e sequence"
YQGARKWCFTIAFNKA

SEQ ID NO: 680 - DNA, 48 bp, Unknown
  source: /note="Description of Unknown: Cas13e sequence"
taccagggcgcccggaagtggtgcttcaccattgccttcaacaaggcc

SEQ ID NO: 681 - protein, 16 aa, Artificial Sequence
  source: /note="Description of Artificial Sequence: Synthetic peptide"
YQGAAAWCFAIAFAAA

SEQ ID NO: 682 - DNA, 48 bp, Artificial Sequence
  source: /note="Description of Artificial Sequence: Synthetic oligonucleotide"
taccagggcgccgccgcctggtgcttcgccattgccttcgccgccgcc

SEQ ID NO: 683 - protein, 16 aa, Artificial Sequence
  source: /note="Description of Artificial Sequence: Synthetic peptide"
YAGARKAAATIAANKA

SEQ ID NO: 684 - DNA, 48 bp, Artificial Sequence
  source: /note="Description of Artificial Sequence: Synthetic oligonucleotide"
tacgccggcgcccggaaggccgccgccaccattgccgccaacaaggcc

SEQ ID NO: 685 - protein, 16 aa, Artificial Sequence
  source: /note="Description of Artificial Sequence: Synthetic peptide"
YQAVRKWCFTAVFNKV

SEQ ID NO: 686 - DNA, 48 bp, Artificial Sequence
  source: /note="Description of Artificial Sequence: Synthetic oligonucleotide"
taccaggccgtgcggaagtggtgcttcaccgccgtgttcaacaaggtg

SEQ ID NO: 687 - protein, 16 aa, Artificial Sequence
  source: /note="Description of Artificial Sequence: Synthetic peptide"
AQGARKWCFTIAFNKA

SEQ ID NO: 688 - DNA, 48 bp, Artificial Sequence
  source: /note="Description of Artificial Sequence: Synthetic oligonucleotide"
gcccagggcgcccggaagtggtgcttcaccattgccttcaacaaggcc

SEQ ID NO: 689 - protein, 17 aa, Artificial Sequence
  source: /note="Description of Artificial Sequence: Synthetic peptide"
LVNAAANAGLFVESLLA

SEQ ID NO: 690 - DNA, 51 bp, Artificial Sequence
  source: /note="Description of Artificial Sequence: Synthetic oligonucleotide"
ctggtgaacgccgccgccaacgccggcctgttcgtggaaagcctgctggcc

SEQ ID NO: 691 - protein, 17 aa, Artificial Sequence
  source: /note="Description of Artificial Sequence: Synthetic peptide"
LVARDKADGLFVAALLR

SEQ ID NO: 692 - DNA, 51 bp, Artificial Sequence
  source: /note="Description of Artificial Sequence: Synthetic oligonucleotide"
ctggtggcccgggacaaggccgacggcctgttcgtggccgccctgctgaga

SEQ ID NO: 693 - protein, 17 aa, Artificial Sequence
  source: /note="Description of Artificial Sequence: Synthetic peptide"
LANRDKNDALAAESLLR

SEQ ID NO: 694 - DNA, 51 bp, Artificial Sequence
  source: /note="Description of Artificial Sequence: Synthetic oligonucleotide"
ctggccaaccgggacaagaacgacgccctggccgccgaaagcctgctgaga

SEQ ID NO: 695 - protein, 17 aa, Artificial Sequence
  source: /note="Description of Artificial Sequence: Synthetic peptide"
AVNRDKNDGAFVESAAR

SEQ ID NO: 696 - DNA, 51 bp, Artificial Sequence
  source: /note="Description of Artificial Sequence: Synthetic oligonucleotide"
gccgtgaaccgggacaagaacgacggcgccttcgtggaaagcgccgccaga

SEQ ID NO: 697 - protein, 16 aa, Artificial Sequence
  source: /note="Description of Artificial Sequence: Synthetic peptide"
AEAYSAADWYDEDTAA

SEQ ID NO: 698 - DNA, 48 bp, Artificial Sequence
  source: /note="Description of Artificial Sequence: Synthetic oligonucleotide"
gccgaggcctacagcgccgccgactggtacgacgaagataccgccgcc

SEQ ID NO: 699 - protein, 16 aa, Artificial Sequence
  source: /note="Description of Artificial Sequence: Synthetic peptide"
HAKYSKHAWYAAATRA

SEQ ID NO: 700 - DNA, 48 bp, Artificial Sequence
  source: /note="Description of Artificial Sequence: Synthetic oligonucleotide"
cacgccaagtacagcaagcacgcctggtacgccgccgccacccgggcc

SEQ ID NO: 701 - protein, 16 aa, Artificial Sequence
  source: /note="Description of Artificial Sequence: Synthetic peptide"
HEKYAKHDAYDEDARV

SEQ ID NO: 702 - DNA, 48 bp, Artificial Sequence
  source: /note="Description of Artificial Sequence: Synthetic oligonucleotide"
cacgagaagtacgccaagcacgacgcctacgacgaagatgcccgggtg

SEQ ID NO: 703 - protein, 16 aa, Artificial Sequence
  source: /note="Description of Artificial Sequence: Synthetic peptide"
HEKASKHDWYDEDTRA

SEQ ID NO: 704 - DNA, 48 bp, Artificial Sequence
  source: /note="Description of Artificial Sequence: Synthetic oligonucleotide"
cacgagaaggccagcaagcacgactggtacgacgaagatacccgggcc

SEQ ID NO: 705 - protein, 16 aa, Artificial Sequence
  source: /note="Description of Artificial Sequence: Synthetic peptide"
HEKYSKHDWADEDTRA

SEQ ID NO: 706 - DNA, 48 bp, Artificial Sequence
  source: /note="Description of Artificial Sequence: Synthetic oligonucleotide"
cacgagaagtacagcaagcacgactgggccgacgaagatacccgggcc

SEQ ID NO: 707 - protein, 16 aa, Unknown
  source: /note="Description of Unknown: Cas13e sequence"
LIKCSTQAANAKAEAL

SEQ ID NO: 708 - DNA, 48 bp, Unknown
  source: /note="Description of Unknown: Cas13e sequence"
ctgatcaagtgcagcacccaggccgccaacgccaaggctgaagccctg

SEQ ID NO: 709 - protein, 16 aa, Artificial Sequence
  source: /note="Description of Artificial Sequence: Synthetic peptide"
LIACATQAANAAAAAL

SEQ ID NO: 710 - DNA, 48 bp, Artificial Sequence
  source: /note="Description of Artificial Sequence: Synthetic oligonucleotide"
ctgatcgcctgcgccacccaggccgccaacgccgccgctgccgccctg

SEQ ID NO: 711 - protein, 16 aa, Artificial Sequence
  source: /note="Description of Artificial Sequence: Synthetic peptide"
LIKASAAAAAAKAEAL

SEQ ID NO: 712 - DNA, 48 bp, Artificial Sequence
  source: /note="Description of Artificial Sequence: Synthetic oligonucleotide"
ctgatcaaggccagcgccgccgccgccgccgccaaggctgaagccctg

SEQ ID NO: 713 - protein, 16 aa, Artificial Sequence
  source: /note="Description of Artificial Sequence: Synthetic peptide"
AAKCSTQVANAKAEAA

SEQ ID NO: 714 - DNA, 48 bp, Artificial Sequence
  source: /note="Description of Artificial Sequence: Synthetic oligonucleotide"
gccgccaagtgcagcacccaggtggccaacgccaaggctgaagccgcc

SEQ ID NO: 715 - protein, 16 aa, Artificial Sequence
  source: /note="Description of Artificial Sequence: Synthetic peptide"
LIKCSTQAVNVKVEVL

SEQ ID NO: 716 - DNA, 48 bp, Artificial Sequence
  source: /note="Description of Artificial Sequence: Synthetic oligonucleotide"
ctgatcaagtgcagcacccaggccgtgaacgtgaaggtggaagtgctg

SEQ ID NO: 717 - protein, 16 aa, Unknown
  source: /note="Description of Unknown: Cas13e sequence"
YRHSPGCLTFTAEDEL

SEQ ID NO: 718 - DNA, 48 bp, Unknown
  source: /note="Description of Unknown: Cas13e sequence"
taccggcatagccctggctgcctgaccttcaccgccgaggacgaactg

SEQ ID NO: 719 - protein, 16 aa, Artificial Sequence
  source: /note="Description of Artificial Sequence: Synthetic peptide"
YAASPGCLTFTAAAAL

SEQ ID NO: 720 - DNA, 48 bp, Artificial Sequence
  source: /note="Description of Artificial Sequence: Synthetic oligonucleotide"
tacgccgccagccctggctgcctgaccttcaccgccgccgccgccctg

SEQ ID NO: 721 - protein, 16 aa, Artificial Sequence
  source: /note="Description of Artificial Sequence: Synthetic peptide"
YRHAPGALAAAAEDEL

SEQ ID NO: 722 - DNA, 48 bp, Artificial Sequence
  source: /note="Description of Artificial Sequence: Synthetic oligonucleotide"
taccggcatgcccctggcgccctggccgccgccgccgaggacgaactg

SEQ ID NO: 723 - protein, 16 aa, Artificial Sequence
  source: /note="Description of Artificial Sequence: Synthetic peptide"
YRHSAACATFTVEDEA

SEQ ID NO: 724 - DNA, 48 bp, Artificial Sequence
  source: /note="Description of Artificial Sequence: Synthetic oligonucleotide"
taccggcatagcgccgcctgcgccaccttcaccgtggaggacgaagcc

SEQ ID NO: 725 - protein, 16 aa, Artificial Sequence
  source: /note="Description of Artificial Sequence: Synthetic peptide"
ARHSPGCLTFTAEDEL

SEQ ID NO: 726 - DNA, 48 bp, Artificial Sequence
  source: /note="Description of Artificial Sequence: Synthetic oligonucleotide"
gcccggcatagccctggctgcctgaccttcaccgccgaggacgaactg

SEQ ID NO: 727 - protein, 16 aa, Unknown
  source: /note="Description of Unknown: Cas13e sequence"
ETEVIIEFPSLFEGDR

SEQ ID NO: 728 - DNA, 48 bp, Unknown
  source: /note="Description of Unknown: Cas13e sequence"
gagacagaggtgatcatcgagtttcccagcctgttcgagggcgaccgg

SEQ ID NO: 729 - protein, 16 aa, Artificial Sequence
  source: /note="Description of Artificial Sequence: Synthetic peptide"
ATAVIIEFPSLFEGAA

SEQ ID NO: 730 - DNA, 48 bp, Artificial Sequence
  source: /note="Description of Artificial Sequence: Synthetic oligonucleotide"
gccacagccgtgatcatcgagtttcccagcctgttcgagggcgccgcc

SEQ ID NO: 731 - protein, 16 aa, Artificial Sequence
  source: /note="Description of Artificial Sequence: Synthetic peptide"
EAEVIIAFPALFAGDR

SEQ ID NO: 732 - DNA, 48 bp, Artificial Sequence
  source: /note="Description of Artificial Sequence: Synthetic oligonucleotide"
gaggccgaggtgatcatcgcctttcccgccctgttcgccggcgaccgg

SEQ ID NO: 733 - protein, 16 aa, Artificial Sequence
  source: /note="Description of Artificial Sequence: Synthetic peptide"
ETEVIIEAASLAEADR

SEQ ID NO: 734 - DNA, 48 bp, Artificial Sequence
  source: /note="Description of Artificial Sequence: Synthetic oligonucleotide"
gagacagaggtgatcatcgaggccgccagcctggccgaggccgaccgg

SEQ ID NO: 735 - protein, 16 aa, Artificial Sequence
  source: /note="Description of Artificial Sequence: Synthetic peptide"
ETEAAAEFPSAFEGDR

SEQ ID NO: 736 - DNA, 48 bp, Artificial Sequence
  source: /note="Description of Artificial Sequence: Synthetic oligonucleotide"
gagacagaggccgccgccgagtttcccagcgccttcgagggcgaccgg

SEQ ID NO: 737 - protein, 16 aa, Unknown
  source: /note="Description of Unknown: Cas13e sequence"
ITTAGVVFFVSFFVER

SEQ ID NO: 738 - DNA, 48 bp, Unknown
  source: /note="Description of Unknown: Cas13e sequence"
atcaccaccgccggcgtggtgtttttcgtgagctttttcgtggaaaga

SEQ ID NO: 739 - protein, 16 aa, Artificial Sequence
  source: /note="Description of Artificial Sequence: Synthetic peptide"
IATAGVVFFVAFFVAA

SEQ ID NO: 740 - DNA, 48 bp, Artificial Sequence
  source: /note="Description of Artificial Sequence: Synthetic oligonucleotide"
atcgccaccgccggcgtggtgtttttcgtggcctttttcgtggccgcc

SEQ ID NO: 741 - protein, 16 aa, Artificial Sequence
  source: /note="Description of Artificial Sequence: Synthetic peptide"
ITAAGVVAAVSAFVER

SEQ ID NO: 742 - DNA, 48 bp, Artificial Sequence
  source: /note="Description of Artificial Sequence: Synthetic oligonucleotide"
atcaccgccgccggcgtggtggccgccgtgagcgccttcgtggaaaga

SEQ ID NO: 743 - protein, 16 aa, Artificial Sequence
  source: /note="Description of Artificial Sequence: Synthetic peptide"
ITTAAAAFFVSFAVER

SEQ ID NO: 744 - DNA, 48 bp, Artificial Sequence
  source: /note="Description of Artificial Sequence: Synthetic oligonucleotide"
atcaccaccgccgccgccgcctttttcgtgagctttgccgtggaaaga

SEQ ID NO: 745 - protein, 16 aa, Artificial Sequence
  source: /note="Description of Artificial Sequence: Synthetic peptide"
ATTVGVVFFASFFAER

SEQ ID NO: 746 - DNA, 48 bp, Artificial Sequence
  source: /note="Description of Artificial Sequence: Synthetic oligonucleotide"
gccaccaccgtgggcgtggtgtttttcgccagctttttcgccgaaaga

SEQ ID NO: 747 - protein, 16 aa, Artificial Sequence
  source: /note="Description of Artificial Sequence: Synthetic peptide"
AVLAALYGAVSGLAAN

SEQ ID NO: 748 - DNA, 48 bp, Artificial Sequence
  source: /note="Description of Artificial Sequence: Synthetic oligonucleotide"
gccgtgctggccgccctgtatggagccgtgtccggcctggccgccaat

SEQ ID NO: 749 - protein, 16 aa, Artificial Sequence
  source: /note="Description of Artificial Sequence: Synthetic peptide"
RALDRLYAAVAALKKA

SEQ ID NO: 750 - DNA, 48 bp, Artificial Sequence
  source: /note="Description of Artificial Sequence: Synthetic oligonucleotide"
agagccctggatcggctgtatgccgccgtggccgccctgaagaaggcc

SEQ ID NO: 751 - protein, 16 aa, Artificial Sequence
  source: /note="Description of Artificial Sequence: Synthetic peptide"
RVADRAYGVASGAKKN

SEQ ID NO: 752 - DNA, 48 bp, Artificial Sequence
  source: /note="Description of Artificial Sequence: Synthetic oligonucleotide"
agagtggccgatcgggcctatggagtggcctccggcgccaagaagaat

SEQ ID NO: 753 - protein, 16 aa, Artificial Sequence
  source: /note="Description of Artificial Sequence: Synthetic peptide"
RVLDRLAGAVSGLKKN

SEQ ID NO: 754 - DNA, 48 bp, Artificial Sequence
  source: /note="Description of Artificial Sequence: Synthetic oligonucleotide"
agagtgctggatcggctggccggagccgtgtccggcctgaagaagaat

SEQ ID NO: 755 - protein, 16 aa, Unknown
  source: /note="Description of Unknown: Cas13e sequence"
EGQYKLTRKALSMYCL

SEQ ID NO: 756 - DNA, 48 bp, Unknown
  source: /note="Description of Unknown: Cas13e sequence"
gagggacagtacaagctgacccggaaggccctgagcatgtactgcctg

SEQ ID NO: 757 - protein, 16 aa, Artificial Sequence
  source: /note="Description of Artificial Sequence: Synthetic peptide"
AGQYALTAAALAMYCL

SEQ ID NO: 758 - DNA, 48 bp, Artificial Sequence
  source: /note="Description of Artificial Sequence: Synthetic oligonucleotide"
gccggacagtacgccctgaccgccgccgccctggccatgtactgcctg

SEQ ID NO: 759 - protein, 16 aa, Artificial Sequence
  source: /note="Description of Artificial Sequence: Synthetic peptide"
EAAYKLARKALSAYAL

SEQ ID NO: 760 - DNA, 48 bp, Artificial Sequence
  source: /note="Description of Artificial Sequence: Synthetic oligonucleotide"
gaggccgcctacaagctggcccggaaggccctgagcgcctacgccctg

SEQ ID NO: 761 - protein, 16 aa, Artificial Sequence
  source: /note="Description of Artificial Sequence: Synthetic peptide"
EGQYKATRKVASMYCA

SEQ ID NO: 762 - DNA, 48 bp, Artificial Sequence
  source: /note="Description of Artificial Sequence: Synthetic oligonucleotide"
gagggacagtacaaggccacccggaaggtggccagcatgtactgcgcc

SEQ ID NO: 763 - protein, 16 aa, Artificial Sequence
  source: /note="Description of Artificial Sequence: Synthetic peptide"
EGQAKLTRKALSMYCL

SEQ ID NO: 764 - DNA, 48 bp, Artificial Sequence
  source: /note="Description of Artificial Sequence: Synthetic oligonucleotide"
gagggacaggccaagctgacccggaaggccctgagcatgtactgcctg

SEQ ID NO: 765 - protein, 16 aa, Artificial Sequence
  source: /note="Description of Artificial Sequence: Synthetic peptide"
EGQYKLTRKALSMACL

SEQ ID NO: 766 - DNA, 48 bp, Artificial Sequence
  source: /note="Description of Artificial Sequence: Synthetic oligonucleotide"
gagggacagtacaagctgacccggaaggccctgagcatggcctgcctg

SEQ ID NO: 767 - protein, 16 aa, Unknown
  source: /note="Description of Unknown: Cas13e sequence"
DKKRANDNEGTNPKRH

SEQ ID NO: 768 - DNA, 48 bp, Unknown
  source: /note="Description of Unknown: Cas13e sequence"
gataagaagagagctaacgacaatgagggcacaaatcccaagcggcac

SEQ ID NO: 769 - protein, 16 aa, Artificial Sequence
  source: /note="Description of Artificial Sequence: Synthetic peptide"
DAARANDNEATNPARH

SEQ ID NO: 770 - DNA, 48 bp, Artificial Sequence
  source: /note="Description of Artificial Sequence: Synthetic oligonucleotide"
gatgccgccagagctaacgacaatgaggccacaaatcccgcccggcac

SEQ ID NO: 771 - protein, 16 aa, Artificial Sequence
  source: /note="Description of Artificial Sequence: Synthetic peptide"
AKKRAAANEGANPKRH

SEQ ID NO: 772 - DNA, 48 bp, Artificial Sequence
  source: /note="Description of Artificial Sequence: Synthetic oligonucleotide"
gccaagaagagagctgccgccaatgagggcgccaatcccaagcggcac

SEQ ID NO: 773 - protein, 16 aa, Artificial Sequence
  source: /note="Description of Artificial Sequence: Synthetic peptide"
DKKRANDAAGTAPKRA

SEQ ID NO: 774 - DNA, 48 bp, Artificial Sequence
  source: /note="Description of Artificial Sequence: Synthetic oligonucleotide"
gataagaagagagctaacgacgccgccggcacagcccccaagcgggcc

SEQ ID NO: 775 - protein, 16 aa, Artificial Sequence
  source: /note="Description of Artificial Sequence: Synthetic peptide"
DKKAVNDNEGTNAKAH

SEQ ID NO: 776 - DNA, 48 bp, Artificial Sequence
  source: /note="Description of Artificial Sequence: Synthetic oligonucleotide"
gataagaaggccgtgaacgacaatgagggcacaaatgccaaggcccac

SEQ ID NO: 777 - protein, 16 aa, Unknown
  source: /note="Description of Unknown: Cas13e sequence"
KSIVFSVSDYGKLYVL

SEQ ID NO: 778 - DNA, 48 bp, Unknown
  source: /note="Description of Unknown: Cas13e sequence"
aagagcatcgtgttctccgtgtctgactacggcaagctgtacgtgctg

SEQ ID NO: 779 - protein, 16 aa, Artificial Sequence
  source: /note="Description of Artificial Sequence: Synthetic peptide"
AAIVFAVADYGALYVL

SEQ ID NO: 780 - DNA, 48 bp, Artificial Sequence
  source: /note="Description of Artificial Sequence: Synthetic oligonucleotide"
gccgccatcgtgttcgccgtggccgactacggcgccctgtacgtgctg

SEQ ID NO: 781 - protein, 16 aa, Artificial Sequence
  source: /note="Description of Artificial Sequence: Synthetic peptide"
KSIAFSASAYAKLYAL

SEQ ID NO: 782 - DNA, 48 bp, Artificial Sequence
  source: /note="Description of Artificial Sequence: Synthetic oligonucleotide"
aagagcatcgccttctccgcctctgcctacgccaagctgtacgccctg

SEQ ID NO: 783 - protein, 16 aa, Artificial Sequence
  source: /note="Description of Artificial Sequence: Synthetic peptide"
KSAVASVSDYGKAYVA

SEQ ID NO: 784 - DNA, 48 bp, Artificial Sequence
  source: /note="Description of Artificial Sequence: Synthetic oligonucleotide"
aagagcgccgtggcctccgtgtctgactacggcaaggcctacgtggcc

SEQ ID NO: 785 - protein, 16 aa, Artificial Sequence
  source: /note="Description of Artificial Sequence: Synthetic peptide"
KSIVFSVSDAGKLYVL

SEQ ID NO: 786 - DNA, 48 bp, Artificial Sequence
  source: /note="Description of Artificial Sequence: Synthetic oligonucleotide"
aagagcatcgtgttctccgtgtctgacgccggcaagctgtacgtgctg

SEQ ID NO: 787 - protein, 16 aa, Artificial Sequence
  source: /note="Description of Artificial Sequence: Synthetic peptide"
KSIVFSVSDYGKLAVL

SEQ ID NO: 788 - DNA, 48 bp, Artificial Sequence
  source: /note="Description of Artificial Sequence: Synthetic oligonucleotide"
aagagcatcgtgttctccgtgtctgactacggcaagctggccgtgctg

SEQ ID NO: 789 - protein, 16 aa, Unknown
  source: /note="Description of Unknown: Cas13e sequence"
DDAEFLGRICEYFMPH

SEQ ID NO: 790 - DNA, 48 bp, Unknown
  source: /note="Description of Unknown: Cas13e sequence"
gacgatgccgaattcctgggccggatctgcgaatacttcatgccccac

SEQ ID NO: 791 - protein, 16 aa, Artificial Sequence
  source: /note="Description of Artificial Sequence: Synthetic peptide"
AAAEFAARIAEYFMPH

SEQ ID NO: 792 - DNA, 48 bp, Artificial Sequence
  source: /note="Description of Artificial Sequence: Synthetic oligonucleotide"
gccgccgccgaattcgccgcccggatcgccgaatacttcatgccccac

SEQ ID NO: 793 - protein, 16 aa, Artificial Sequence
  source: /note="Description of Artificial Sequence: Synthetic peptide"
DDAEALGRACEYAAPA

SEQ ID NO: 794 - DNA, 48 bp, Artificial Sequence
  source: /note="Description of Artificial Sequence: Synthetic oligonucleotide"
gacgatgccgaagccctgggccgggcctgcgaatacgccgcccccgcc

SEQ ID NO: 795 - protein, 16 aa, Artificial Sequence
  source: /note="Description of Artificial Sequence: Synthetic peptide"
DDVAFLGAICAYFMAH

SEQ ID NO: 796 - DNA, 48 bp, Artificial Sequence
  source: /note="Description of Artificial Sequence: Synthetic oligonucleotide"
gacgatgtggccttcctgggcgccatctgcgcctacttcatggcccac

SEQ ID NO: 797 - protein, 16 aa, Artificial Sequence
  source: /note="Description of Artificial Sequence: Synthetic peptide"
DDAEFLGRICEAFMPH

SEQ ID NO: 798 - DNA, 48 bp, Artificial Sequence
  source: /note="Description of Artificial Sequence: Synthetic oligonucleotide"
gacgatgccgaattcctgggccggatctgcgaagccttcatgccccac

SEQ ID NO: 799 - protein, 16 aa, Artificial Sequence
  source: /note="Description of Artificial Sequence: Synthetic peptide"
EAAAIRYHTVYEAAFR

SEQ ID NO: 800 - DNA, 48 bp, Artificial Sequence
  source: /note="Description of Artificial Sequence: Synthetic oligonucleotide"
gaagccgccgccatccggtaccacacagtgtacgaagccgcctttaga

SEQ ID NO: 801 - protein, 16 aa, Artificial Sequence
  source: /note="Description of Artificial Sequence: Synthetic peptide"
EKGKARYAAAYEKGAR

SEQ ID NO: 802 - DNA, 48 bp, Artificial Sequence
  source: /note="Description of Artificial Sequence: Synthetic oligonucleotide"
gaaaagggcaaggcccggtacgccgccgcctacgaaaagggcgccaga

SEQ ID NO: 803 - protein, 16 aa, Artificial Sequence
  source: /note="Description of Artificial Sequence: Synthetic peptide"
AKGKIAYHTVYAKGFA

SEQ ID NO: 804 - DNA, 48 bp, Artificial Sequence
  source: /note="Description of Artificial Sequence: Synthetic oligonucleotide"
gccaagggcaagatcgcctaccacacagtgtacgccaagggctttgcc

SEQ ID NO: 805 - protein, 16 aa, Unknown
  source: /note="Description of Unknown: Cas13e sequence"
AYNDLQKKCVEAVLAF

SEQ ID NO: 806 - DNA, 48 bp, Unknown
  source: /note="Description of Unknown: Cas13e sequence"
gcatacaacgacctgcagaagaagtgcgtggaggccgtgctggctttc

SEQ ID NO: 807 - protein, 16 aa, Artificial Sequence
  source: /note="Description of Artificial Sequence: Synthetic peptide"
AYAALQAACAEAVLAF

SEQ ID NO: 808 - DNA, 48 bp, Artificial Sequence
  source: /note="Description of Artificial Sequence: Synthetic oligonucleotide"
gcatacgccgccctgcaggccgcctgcgccgaggccgtgctggctttc

SEQ ID NO: 809 - protein, 16 aa, Artificial Sequence
  source: /note="Description of Artificial Sequence: Synthetic peptide"
AYNDAAKKAVEAAAAF

SEQ ID NO: 810 - DNA, 48 bp, Artificial Sequence
  source: /note="Description of Artificial Sequence: Synthetic oligonucleotide"
gcatacaacgacgccgccaagaaggccgtggaggccgccgccgctttc

SEQ ID NO: 811 - protein, 16 aa, Artificial Sequence
  source: /note="Description of Artificial Sequence: Synthetic peptide"
VYNDLQKKCVAVVLVA

SEQ ID NO: 812 - DNA, 48 bp, Artificial Sequence
  source: /note="Description of Artificial Sequence: Synthetic oligonucleotide"
gtgtacaacgacctgcagaagaagtgcgtggccgtggtgctggtggcc

SEQ ID NO: 813 - protein, 16 aa, Artificial Sequence
  source: /note="Description of Artificial Sequence: Synthetic peptide"
AANDLQKKCVEAVLAF

SEQ ID NO: 814 - DNA, 48 bp, Artificial Sequence
  source: /note="Description of Artificial Sequence: Synthetic oligonucleotide"
gcagccaacgacctgcagaagaagtgcgtggaggccgtgctggctttc

SEQ ID NO: 815 - protein, 16 aa, Artificial Sequence
  source: /note="Description of Artificial Sequence: Synthetic peptide"
GAHYIDFREILAQTMA

SEQ ID NO: 816 - DNA, 48 bp, Artificial Sequence
  source: /note="Description of Artificial Sequence: Synthetic oligonucleotide"
ggcgcccactacatcgacttccgggagatcctggcccagaccatggcc

SEQ ID NO: 817 - protein, 16 aa, Artificial Sequence
  source: /note="Description of Artificial Sequence: Synthetic peptide"
AAHYIAFREIAAAAMC

SEQ ID NO: 818 - DNA, 48 bp, Artificial Sequence
  source: /note="Description of Artificial Sequence: Synthetic oligonucleotide"
gccgcccactacatcgccttccgggagatcgccgccgccgccatgtgc

SEQ ID NO: 819 - protein, 16 aa, Artificial Sequence
  source: /note="Description of Artificial Sequence: Synthetic peptide"
GAAYADFREALAQTAA

SEQ ID NO: 820 - DNA, 48 bp, Artificial Sequence
  source: /note="Description of Artificial Sequence: Synthetic oligonucleotide"
ggcgccgcctacgccgacttccgggaggccctggcccagaccgccgcc

SEQ ID NO: 821 - protein, 16 aa, Artificial Sequence
  source: /note="Description of Artificial Sequence: Synthetic peptide"
GVHYIDAAAILVQTMC

SEQ ID NO: 822 - DNA, 48 bp, Artificial Sequence
  source: /note="Description of Artificial Sequence: Synthetic oligonucleotide"
ggcgtgcactacatcgacgccgccgccatcctggtgcagaccatgtgc

SEQ ID NO: 823 - protein, 16 aa, Artificial Sequence
  source: /note="Description of Artificial Sequence: Synthetic peptide"
AAHYIDFREILAQTMC

SEQ ID NO: 824 - DNA, 48 bp, Artificial Sequence
  source: /note="Description of Artificial Sequence: Synthetic oligonucleotide"
gccgcccactacatcgacttccgggagatcctggcccagaccatgtgc

SEQ ID NO: 825 - protein, 16 aa, Artificial Sequence
  source: /note="Description of Artificial Sequence: Synthetic peptide"
GAHYADFREALAQTMC

SEQ ID NO: 826 - DNA, 48 bp, Artificial Sequence
  source: /note="Description of Artificial Sequence: Synthetic oligonucleotide"
ggcgcccactacgccgacttccgggaggccctggcccagaccatgtgc

SEQ ID NO: 827 - protein, 16 aa, Artificial Sequence
  source: /note="Description of Artificial Sequence: Synthetic peptide"
GAHYIDFREILAQAMC

SEQ ID NO: 828 - DNA, 48 bp, Artificial Sequence
  source: /note="Description of Artificial Sequence: Synthetic oligonucleotide"
ggcgcccactacatcgacttccgggagatcctggcccaggccatgtgc

SEQ ID NO: 829 - protein, 16 aa, Unknown
  source: /note="Description of Unknown: Cas13e sequence"
KEAEKTAVNKVRRAFF

SEQ ID NO: 830 - DNA, 48 bp, Unknown
  source: /note="Description of Unknown: Cas13e sequence"
aaggaggccgaaaagaccgcagtgaacaaggtgagacgcgccttcttc

SEQ ID NO: 831 - protein, 16 aa, Artificial Sequence
  source: /note="Description of Artificial Sequence: Synthetic peptide"
AEAEAAAVNAVRRAFF

SEQ ID NO: 832 - DNA, 48 bp, Artificial Sequence
  source: /note="Description of Artificial Sequence: Synthetic oligonucleotide"
gccgaggccgaagccgccgcagtgaacgccgtgagacgcgccttcttc

SEQ ID NO: 833 - protein, 16 aa, Artificial Sequence
  source: /note="Description of Artificial Sequence: Synthetic peptide"
KEAEKTAAAKARRAAA

SEQ ID NO: 834 - DNA, 48 bp, Artificial Sequence
  source: /note="Description of Artificial Sequence: Synthetic oligonucleotide"
aaggaggccgaaaagaccgcagccgccaaggccagacgcgccgccgcc

SEQ ID NO: 835 - protein, 16 aa, Artificial Sequence
  source: /note="Description of Artificial Sequence: Synthetic peptide"
KAVAKTVVNKVRRVFF

SEQ ID NO: 836 - DNA, 48 bp, Artificial Sequence
  source: /note="Description of Artificial Sequence: Synthetic oligonucleotide"
aaggccgtggccaagaccgtggtgaacaaggtgagacgcgtgttcttc

SEQ ID NO: 837 - protein, 16 aa, Artificial Sequence
  source: /note="Description of Artificial Sequence: Synthetic peptide"
KEAEKTAVNKVAAAFF

SEQ ID NO: 838 - DNA, 48 bp, Artificial Sequence
  source: /note="Description of Artificial Sequence: Synthetic oligonucleotide"
aaggaggccgaaaagaccgcagtgaacaaggtggccgccgccttcttc

SEQ ID NO: 839 - protein, 15 aa, Unknown
  source: /note="Description of Unknown: Cas13e sequence"
HHLKFVIDEFGLFSD

SEQ ID NO: 840 - DNA, 45 bp, Unknown
  source: /note="Description of Unknown: Cas13e sequence"
caccacctgaagttcgtgattgacgagttcggcctgttcagcgac

SEQ ID NO: 841 - protein, 15 aa, Artificial Sequence
  source: /note="Description of Artificial Sequence: Synthetic peptide"
HHLAFVIAEFALFAA

SEQ ID NO: 842 - DNA, 45 bp, Artificial Sequence
  source: /note="Description of Artificial Sequence: Synthetic oligonucleotide"
caccacctggccttcgtgattgccgagttcgccctgttcgccgcc

SEQ ID NO: 843 - protein, 15 aa, Artificial Sequence
  source: /note="Description of Artificial Sequence: Synthetic peptide"
AALKFVIDEFGLFSD

SEQ ID NO: 844 - DNA, 45 bp, Artificial Sequence
  source: /note="Description of Artificial Sequence: Synthetic oligonucleotide"
gccgccctgaagttcgtgattgacgagttcggcctgttcagcgac

SEQ ID NO: 845 - protein, 15 aa, Artificial Sequence
  source: /note="Description of Artificial Sequence: Synthetic peptide"
HHAKFAIDEFGAFSD

SEQ ID NO: 846 - DNA, 45 bp, Artificial Sequence
  source: /note="Description of Artificial Sequence: Synthetic oligonucleotide"
caccacgccaagttcgccattgacgagttcggcgccttcagcgac

SEQ ID NO: 847 - protein, 15 aa, Artificial Sequence
  source: /note="Description of Artificial Sequence: Synthetic peptide"
HHLKAVADAAGLASD

SEQ ID NO: 848 - DNA, 45 bp, Artificial Sequence
  source: /note="Description of Artificial Sequence: Synthetic oligonucleotide"
caccacctgaaggccgtggccgacgccgccggcctggccagcgac

SEQ ID NO: 849 - protein, 16 aa, Artificial Sequence
  source: /note="Description of Artificial Sequence: Synthetic peptide"
EKGKIRAHTVAEKGFR

SEQ ID NO: 850 - DNA, 30 bp, Artificial Sequence
  source: /note="Description of Artificial Sequence: Synthetic oligonucleotide"
gtcctccttgaagtcgatgcccttcagctc

SEQ ID NO: 851 - DNA, 30 bp, Artificial Sequence
  source: /note="Description of Artificial Sequence: Synthetic oligonucleotide"
gcaggaccatgtgatcgcgcttctcgttgg

SEQ ID NO: 852 - DNA, 30 bp, Artificial Sequence
  source: /note="Description of Artificial Sequence: Synthetic oligonucleotide"
gaacttcagggtcagcttgccgtaggtggc

SEQ ID NO: 853 - RNA, 100 nt, Artificial Sequence
  source: /note="Description of Artificial Sequence: Synthetic polynucleotide"
ggccagugaauucgagcucgguacccggggauccucuagaaauauggauuacuugguagaacagcaaucuacucgaccugcaggcaugcaagcuuggcgu

SEQ ID NO: 854 - RNA, 67 nt, Artificial Sequence
  source: /note="Description of Artificial Sequence: Synthetic oligonucleotide"
gggcaaguaaaccccuaccaacuggucgggguuugaaacuagauugcuguucuaccaaguaauccau

SEQ ID NO: 855 - protein, 611 aa, Unknown
  source: /note="Description of Unknown: AmaCas13c sequence"
MLEEENRFLSYRSNMIIINEIWKYESIEKSINQYILNHNKEKKIDISEERIKEDLKKTFILFSRLRIKLVKNAVSNYLDKKTTIHVLNKNINAIKLLDIYRKHFNENMNKLHSDFKTNNKKKETYNLLKQELKKLRLWFNAPYVYVERKKKKLNENVKLCELNTEMKEMLNSKYRLQYKLQLAFGFILEEFNLDIDKFVSADKDNNLTISEKRETYLSKSLDRRDNRFKKLIKDYKFRDTSDRENNLVKLYILMYILLPVEIRGDFLGFVKKNYYDLKHVDFIDKRNNDTFFHDLRLFEKNTSYIALPTNIDIKEFMKNYQIIFKLLNDIEISALFLIAKKEGNEGSITFKKVIDKVRKDMNGNINFSQVMKMALNEKVNCQIRNSIAHINMKQLYIEPLNIYINNKTISEQMEEIIDICITKGLTGKELNKNIINDYYMKKEKLVFNLKLRKRNNLVSIDAQQKNSILNKYDLNYKDENLNIKEIILKVNDLNNKLKETTEGESNYKNALSKDILLLNGIIRKNIKIKEMILGIININIYDKNESTDERINFKIKYMLLVPSCYEDIYIKKKIDLEIRYIENGKTLDVKKNNQKVNLESNYIQNIKFIVS

SEQ ID NO: 856 - RNA, 32 nt, Artificial Sequence
  source: /note="Description of Artificial Sequence: Synthetic oligonucleotide"
aaagauacgagggugcuauguuuccacgcucc

SEQ ID NO: 857 - DNA, 30 bp, Artificial Sequence
  source: /note="Description of Artificial Sequence: Synthetic oligonucleotide"
tcgccgtccagctcgaccaggatgggcacc

SEQ ID NO: 858 - DNA, 30 bp, Artificial Sequence
  source: /note="Description of Artificial Sequence: Synthetic oligonucleotide"
ttcgggcatggcggacttgaagaagtcgtg

SEQ ID NO: 859 - RNA, 100 nt, Artificial Sequence; identical to SEQ ID NO: 853
  source: /note="Description of Artificial Sequence: Synthetic polynucleotide"

SEQ ID NO: 860 - RNA, 66 nt, Artificial Sequence
  source: /note="Description of Artificial Sequence: Synthetic oligonucleotide"
aguagauugcuguucuaccaaguaauccaugcuggagcagcccccgauuuguggggugauuacagc

SEQ ID NO: 861 - RNA, 100 nt, Artificial Sequence; identical to SEQ ID NO: 853
  source: /note="Description of Artificial Sequence: Synthetic polynucleotide"

SEQ ID NO: 862 - RNA, 66 nt, Artificial Sequence; identical to SEQ ID NO: 860
  source: /note="Description of Artificial Sequence: Synthetic oligonucleotide"

SEQ ID NO: 863 - DNA, 30 bp, Artificial Sequence
  source: /note="Description of Artificial Sequence: Synthetic oligonucleotide"
ttaggcagccctcatcagtgccggctccct

SEQ ID NO: 864 - DNA, 30 bp, Artificial Sequence
  source: /note="Description of Artificial Sequence: Synthetic oligonucleotide"
cctcctgaccagaagctgcctgaaggctca

SEQ ID NO: 865 - DNA, 30 bp, Artificial Sequence
  source: /note="Description of Artificial Sequence: Synthetic oligonucleotide"
agcacaatccaggtcacacattccagaaga

SEQ ID NO: 866 - DNA, 30 bp, Artificial Sequence
  source: /note="Description of Artificial Sequence: Synthetic oligonucleotide"
gcagccgcttaagcacctccgagaacttct

SEQ ID NO: 867 - DNA, 30 bp, Artificial Sequence
  source: /note="Description of Artificial Sequence: Synthetic oligonucleotide"
gtttctggcagttctcctctcctgcacccc

SEQ ID NO: 868 - DNA, 30 bp, Artificial Sequence
  source: /note="Description of Artificial Sequence: Synthetic oligonucleotide"
caaatgctggtaacactgtggtccacaagg

SEQ ID NO: 869 - DNA, 30 bp, Artificial Sequence
  source: /note="Description of Artificial Sequence: Synthetic oligonucleotide"
cttggcctggacggcgtaagaagccaggag

SEQ ID NO: 870 - DNA, 30 bp, Artificial Sequence
  source: /note="Description of Artificial Sequence: Synthetic oligonucleotide"
ctgtctggtcttggctgaggtttcaatgaa

SEQ ID NO: 871 - DNA, 30 bp, Artificial Sequence
  source: /note="Description of Artificial Sequence: Synthetic oligonucleotide"
cattatgagacatccccactgcaaggcatt

SEQ ID NO: 872 - DNA, 30 bp, Artificial Sequence
  source: /note="Description of Artificial Sequence: Synthetic oligonucleotide"
aaacaccacatgcttgccatccaaccactc

SEQ ID NO: 873 - DNA, 30 bp, Artificial Sequence
  source: /note="Description of Artificial Sequence: Synthetic oligonucleotide"
atgccaggacccgtatgctttaggatgaag

SEQ ID NO: 874 - DNA, 30 bp, Artificial Sequence
  source: /note="Description of Artificial Sequence: Synthetic oligonucleotide"
gttgtgttcactctacgatgccaacggcgc

SEQ ID NO: 875 - DNA, 30 bp, Artificial Sequence
  source: /note="Description of Artificial Sequence: Synthetic oligonucleotide"
gaagttcaggaacttcctcaatacgatgac

SEQ ID NO: 876 - DNA, 30 bp, Artificial Sequence
  source: /note="Description of Artificial Sequence: Synthetic oligonucleotide"
acacatccacagcctgtcgtctcacagtcc

SEQ ID NO: 877 - DNA, 30 bp, Artificial Sequence
  source: /note="Description of Artificial Sequence: Synthetic oligonucleotide"
ctggtgaggattccagtcgctgtcaaaaat

SEQ ID NO: 878 - DNA, 30 bp, Artificial Sequence
  source: /note="Description of Artificial Sequence: Synthetic oligonucleotide"
atcacaattggctcggcccccattcccaca

SEQ ID NO: 879 - DNA, 30 bp, Artificial Sequence
  source: /note="Description of Artificial Sequence: Synthetic oligonucleotide"
gtgctgtaggaagctcatctctcctatgtg

SEQ ID NO: 880 - DNA, 30 bp, Artificial Sequence
  source: /note="Description of Artificial Sequence: Synthetic oligonucleotide"
ggtactcctggaagatgtccaccagggtct

SEQ ID NO: 881 - DNA, 141 bp, Artificial Sequence
  source: /note="Description of Artificial Sequence: Synthetic polynucleotide"
cctgcaggcagctgcgcgctcgctcgctcactgaggccgcccgggcaaagcccgggcgtcgggcgacctttggtcgcccggcctcagtgagcgagcgagcgcgcagagagggagtggccaactccatcactaggggttcct

SEQ ID NO: 882 - DNA, 261 bp, Artificial Sequence
  source: /note="Description of Artificial Sequence: Synthetic polynucleotide"
taggtcttgaaaggagtgggaattggctccggtgcccgtcagtgggcagagcgcacatcgcccacagtccccgagaagttggggggaggggtcggcaattgatccggtgcctagagaaggtggcgcggggtaaactgggaaagtgatgtcgtgtactggctccgcctttttcccgagggtgggggagaaccgtatataagtgcagtagtcgccgtgaacgttctttttcgcaacgggtttgccgccagaacacagggttgg

SEQ ID NO: 883 - DNA, 30 bp, Artificial Sequence
  source: /note="Description of Artificial Sequence: Synthetic oligonucleotide"
acttgatgttgacgttgtaggcgccgggca

SEQ ID NO: 884 - DNA, 30 bp, Artificial Sequence
  source: /note="Description of Artificial Sequence: Synthetic oligonucleotide"
cacgtaggccttggagccgtacatgaactg

SEQ ID NO: 885 - DNA, 30 bp, Artificial Sequence
  source: /note="Description of Artificial Sequence: Synthetic oligonucleotide"
gcagcttcaccttgtagatgaactcgccgt

SEQ ID NO: 886 - DNA, 30 bp, Artificial Sequence
  source: /note="Description of Artificial Sequence: Synthetic oligonucleotide"
cgtctggccttcctgtagccagctttcatc

SEQ ID NO: 887 - DNA, 30 bp, Artificial Sequence
  source: /note="Description of Artificial Sequence: Synthetic oligonucleotide"
ctttagacatgaccagtgctggtagggctg

SEQ ID NO: 888 - DNA, 30 bp, Artificial Sequence
  source: /note="Description of Artificial Sequence: Synthetic oligonucleotide"
ggtttctcattttgcctttgccagctctca

SEQ ID NO: 889 - DNA, 30 bp, Artificial Sequence
  source: /note="Description of Artificial Sequence: Synthetic oligonucleotide"
ggctcccttcttcagctccacctctgcagt

SEQ ID NO: 890 - DNA, 30 bp, Artificial Sequence
  source: /note="Description of Artificial Sequence: Synthetic oligonucleotide"
gtaggcgttatccagcgtgattttgagagt

SEQ ID NO: 891 - DNA, 30 bp, Artificial Sequence
  source: /note="Description of Artificial Sequence: Synthetic oligonucleotide"
gttcttgtagtccagccacaggatgttctc

SEQ ID NO: 892 - DNA, 30 bp, Artificial Sequence
  source: /note="Description of Artificial Sequence: Synthetic oligonucleotide"
gtagatcttgctgcccacttccaccacctt

SEQ ID NO: 893 - DNA, 30 bp, Artificial Sequence
  source: /note="Description of Artificial Sequence: Synthetic oligonucleotide"
ggtctttgccaaccaggacacccacctcag

SEQ ID NO: 894 - DNA, 30 bp, Artificial Sequence
  source: /note="Description of Artificial Sequence: Synthetic oligonucleotide"
gcagtgagtcccggatcaccgaacatttct

SEQ ID NO: 895 - DNA, 30 bp, Artificial Sequence
  source: /note="Description of Artificial Sequence: Synthetic oligonucleotide"
gtgctcttggtacgaagatccatgctaaat

SEQ ID NO: 896 - DNA, 30 bp, Artificial Sequence
  source: /note="Description of Artificial Sequence: Synthetic oligonucleotide"
gtcagtcttggtgacagtgacattgaaggt

SEQ ID NO: 897 - DNA, 30 bp, Artificial Sequence
  source: /note="Description of Artificial Sequence: Synthetic oligonucleotide"
actcgtaagtgcccgtgtcctcctccacga

SEQ ID NO: 898 - DNA, 30 bp, Artificial Sequence
  source: /note="Description of Artificial Sequence: Synthetic oligonucleotide"
gtcattcaaggagcaggtgaggagtatctt

SEQ ID NO: 899 - DNA, 30 bp, Artificial Sequence
  source: /note="Description of Artificial Sequence: Synthetic oligonucleotide"
tctgacgacttcacagccttcactctggga

SEQ ID NO: 900 - DNA, 30 bp, Artificial Sequence
  source: /note="Description of Artificial Sequence: Synthetic oligonucleotide"
cttgtcctcagagtcagtgatcttgtacca

SEQ ID NO: 901 - DNA, 30 bp, Artificial Sequence
  source: /note="Description of Artificial Sequence: Synthetic oligonucleotide"
gtgcagagccggcgtcgtcatcatccagga

SEQ ID NO: 902 - DNA, 30 bp, Artificial Sequence
  source: /note="Description of Artificial Sequence: Synthetic oligonucleotide"
tatgccagtgctcaggtccgttgtgtttgc

SEQ ID NO: 903 - DNA, 30 bp, Artificial Sequence
  source: /note="Description of Artificial Sequence: Synthetic oligonucleotide"
cagggaagttgcttgatcataggaaacaga

SEQ ID NO: 904 - DNA, 30 bp, Artificial Sequence
  source: /note="Description of Artificial Sequence: Synthetic oligonucleotide"
aaactgaatcaatctgtaagtgccatccag

SEQ ID NO: 905 - DNA, 30 bp, Artificial Sequence
  source: /note="Description of Artificial Sequence: Synthetic oligonucleotide"
tttatccacagtatgctctgaaccttgtcc

SEQ ID NO: 906 - DNA, 30 bp, Artificial Sequence
  source: /note="Description of Artificial Sequence: Synthetic oligonucleotide"
gaatccagcacatcaacaactttctgaagg

SEQ ID NO: 907 - DNA, 30 bp, Artificial Sequence
  source: /note="Description of Artificial Sequence: Synthetic oligonucleotide"
gcgccagttgtccaccatcagttcttcggg

SEQ ID NO: 908 - DNA, 30 bp, Artificial Sequence
  source: /note="Description of Artificial Sequence: Synthetic oligonucleotide"
tggcccgggttgtccacgcctgtctggatg

SEQ ID NO: 909 - DNA, 30 bp, Artificial Sequence
  source: /note="Description of Artificial Sequence: Synthetic oligonucleotide"
cgcccgccacgcagcccacggtcatgatgt

SEQ ID NO: 910 - DNA, 30 bp, Artificial Sequence
  source: /note="Description of Artificial Sequence: Synthetic oligonucleotide"
ctgctgctgctccgcctccgtcatgctctt

SEQ ID NO: 911 - DNA, 30 bp, Artificial Sequence
  source: /note="Description of Artificial Sequence: Synthetic oligonucleotide"
gtcttattgtcattgtgccagataccgcgg

SEQ ID NO: 912 - DNA, 30 bp, Artificial Sequence
  source: /note="Description of Artificial Sequence: Synthetic oligonucleotide"
atatagcgagtcttatcattgtcccggagc

SEQ ID NO: 913 - DNA, 30 bp, Artificial Sequence
  source: /note="Description of Artificial Sequence: Synthetic oligonucleotide"
atcatcagtttgtcaatcttctcttgttct

SEQ ID NO: 914 - DNA, 30 bp, Artificial Sequence
  source: /note="Description of Artificial Sequence: Synthetic oligonucleotide"
cgccattgatgacattgaacgccgggactg

SEQ ID NO: 915 - DNA, 30 bp, Artificial Sequence
  source: /note="Description of Artificial Sequence: Synthetic oligonucleotide"
tctttcccatatttctccttgatgacattc

SEQ ID NO: 916 - DNA, 30 bp, Artificial Sequence
  source: /note="Description of Artificial Sequence: Synthetic oligonucleotide"
ccttatcagtgtagccagctttcccaatag

SEQ ID NO: 917 - DNA, 30 bp, Artificial Sequence
  source: /note="Description of Artificial Sequence: Synthetic oligonucleotide"
actacctggattcctgcactggctgtgaac

SEQ ID NO: 918 - DNA, 30 bp, Artificial Sequence
  source: /note="Description of Artificial Sequence: Synthetic oligonucleotide"
ccaccatgctgtactgagaagaccaatctg

SEQ ID NO: 919 - DNA, 30 bp, Artificial Sequence
  source: /note="Description of Artificial Sequence: Synthetic oligonucleotide"
gcaggttcggtgtaggtgtgtggcccatag

SEQ ID NO: 920 - DNA, 30 bp, Artificial Sequence
  source: /note="Description of Artificial Sequence: Synthetic oligonucleotide"
tgcggtccttgtcctcctccgactcacagg

SEQ ID NO: 921 - DNA, 30 bp, Artificial Sequence
  source: /note="Description of Artificial Sequence: Synthetic oligonucleotide"
ttgtccttcatgaagacgttgcggttgcca

SEQ ID NO: 922 - DNA, 30 bp, Artificial Sequence
  source: /note="Description of Artificial Sequence: Synthetic oligonucleotide"
cctcacactccagcgccgccatcttctttc

SEQ ID NO: 923 - DNA, 30 bp, Artificial Sequence
  source: /note="Description of Artificial Sequence: Synthetic oligonucleotide"
aacgcgtagtcctgcttctctttccagtgg

SEQ ID NO: 924 - DNA, 30 bp, Artificial Sequence
  source: /note="Description of Artificial Sequence: Synthetic oligonucleotide"
gaccacgactgcgagcggaagccactggac

SEQ ID NO: 925 - DNA, 30 bp, Artificial Sequence
  source: /note="Description of Artificial Sequence: Synthetic oligonucleotide"
ttataggaggaggacacggtgctgggcgag

SEQ ID NO: 926 - DNA, 30 bp, Artificial Sequence
  source: /note="Description of Artificial Sequence: Synthetic oligonucleotide"
atctccgcctcaatctccttattctgctgc

SEQ ID NO: 927 - DNA, 30 bp, Artificial Sequence
  source: /note="Description of Artificial Sequence: Synthetic oligonucleotide"
ctccaccttgaccagcgacgcctcctcgat

SEQ ID NO: 928 - DNA, 30 bp, Artificial Sequence
  source: /note="Description of Artificial Sequence: Synthetic oligonucleotide"
cttggcgtagcggcatttgaaccactcttc

SEQ ID NO: 929 - DNA, 30 bp, Artificial Sequence
  source: /note="Description of Artificial Sequence: Synthetic oligonucleotide"
tcctgcaaatgtgctaaatctagtctcttc

SEQ ID NO: 930 - DNA, 30 bp, Artificial Sequence
  source: /note="Description of Artificial Sequence: Synthetic oligonucleotide"
tcagcactttgcccagctcgtccaccgccg

SEQ ID NO: 931 - DNA, 30 bp, Artificial Sequence
  source: /note="Description of Artificial Sequence: Synthetic oligonucleotide"
tattcttaacctgggtgggcgtcagcactt

SEQ ID NO: 932 - DNA, 30 bp, Artificial Sequence
  source: /note="Description of Artificial Sequence: Synthetic oligonucleotide"
cttccctgaatcaagaccatcccacgaaat

SEQ ID NO: 933 - DNA, 30 bp, Artificial Sequence
  source: /note="Description of Artificial Sequence: Synthetic oligonucleotide"
atgccattctctgtatttgggatccttcct

SEQ ID NO: 934 - DNA, 30 bp, Artificial Sequence
  source: /note="Description of Artificial Sequence: Synthetic oligonucleotide"
atgttgaccaccaggaaatgatgccattct

SEQ ID NO: 935 - DNA, 30 bp, Artificial Sequence
  source: /note="Description of Artificial Sequence: Synthetic oligonucleotide"
ccactgctgatgtcattgcccttcatgttg

SEQ ID NO: 936 - DNA, 30 bp, Artificial Sequence
  source: /note="Description of Artificial Sequence: Synthetic oligonucleotide"
caaacagctcaaaggagacgcggcccaagg

SEQ ID NO: 937 - DNA, 30 bp, Artificial Sequence
  source: /note="Description of Artificial Sequence: Synthetic oligonucleotide"
aacccttataaccaaatcctttctctccag

SEQ ID NO: 938 - DNA, 30 bp, Artificial Sequence
  source: /note="Description of Artificial Sequence: Synthetic oligonucleotide"
caccctgacacataaaccctggaataattc

SEQ ID NO: 939 - DNA, 30 bp, Artificial Sequence
  source: /note="Description of Artificial Sequence: Synthetic oligonucleotide"
cctccacaatattcatgccttctttcactt

SEQ ID NO: 940 - DNA, 30 bp, Artificial Sequence
  source: /note="Description of Artificial Sequence: Synthetic oligonucleotide"
atacttctccttcactgcaatgtaatcctg

SEQ ID NO: 941 - DNA, 30 bp, Artificial Sequence
  source: /note="Description of Artificial Sequence: Synthetic oligonucleotide"
gagttagtgaggcgctccacaatgggacac

SEQ ID NO: 942 - DNA, 30 bp, Artificial Sequence
  source: /note="Description of Artificial Sequence: Synthetic oligonucleotide"
ctcatagttgtccataagtgttttggaagg

SEQ ID NO: 943 - DNA, 30 bp, Artificial Sequence
  source: /note="Description of Artificial Sequence: Synthetic oligonucleotide"
ggcccgtagtgcttcagtttgaagttctca

SEQ ID NO: 944 - DNA, 30 bp, Artificial Sequence
  source: /note="Description of Artificial Sequence: Synthetic oligonucleotide"
ctcaatcatcctgctgtccacaggcagggt

SEQ ID NO: 945 - DNA, 30 bp, Artificial Sequence
  source: /note="Description of Artificial Sequence: Synthetic oligonucleotide"
tcagtccaaatgcagaaacgtcccacatgc

SEQ ID NO: 946 - DNA, 30 bp, Artificial Sequence
  source: /note="Description of Artificial Sequence: Synthetic oligonucleotide"
caatacgatgacctttagacatgaccagtg

SEQ ID NO: 947 - protein, 6 aa, Artificial Sequence
  source: /note="Description of Artificial Sequence: Synthetic 6xHistag"
HHHHHH

SEQ ID NO: 948 - protein, 17 aa, Unknown
  source: /note="Description of Unknown: Cas13d sequence"
KETLEKRYFGESADGND

SEQ ID NO: 949 - protein, 17 aa, Artificial Sequence
  source: /note="Description of Artificial Sequence: Synthetic peptide"
KETLAKAYFGASVDGND

SEQ ID NO: 950 - protein, 17 aa, Artificial Sequence
  source: /note="Description of Artificial Sequence: Synthetic peptide"
ALAAYATNAAYAVNNAS

SEQ ID NO: 951 - protein, 17 aa, Artificial Sequence
  source: /note="Description of Artificial Sequence: Synthetic peptide"
ILVEYITNVVYVVNNIS

SEQ ID NO: 952 - protein, 17 aa, Unknown
  source: /note="Description of Unknown: Cas13d sequence"
YDEFKDPEHHRAAFNNN

SEQ ID NO: 953 - protein, 17 aa, Artificial Sequence
  source: /note="Description of Artificial Sequence: Synthetic peptide"
YDAAKDPEHARAAANNN

SEQ ID NO: 954 - protein, 17 aa, Unknown
  source: /note="Description of Unknown: Cas13d sequence"
VIGFHCVERDAQLYKEK

SEQ ID NO: 955 - protein, 17 aa, Artificial Sequence
  source: /note="Description of Artificial Sequence: Synthetic peptide"
AAAFHCVERDAQLYAEA

SEQ ID NO: 956 - DNA, 30 bp, Homo sapiens
gtcatcgtattgaggaagttcctgaacttc

SEQ ID NO: 957 - DNA, 30 bp, Homo sapiens
atcatcgtagtgcagaagcgcctggacttc

SEQ ID NO: 958 - DNA, 30 bp, Homo sapiens
gagtggttggatggcaagcatgtggtgttt

SEQ ID NO: 959 - DNA, 30 bp, Homo sapiens
gactggctggatggcaagcatgtggtgttt

SEQ ID NO: 960 - DNA, 30 bp, Homo sapiens
gattggctggatgggaagcatgtggtgttt

SEQ ID NO: 961 - DNA, 30 bp, Homo sapiens
gactggttggatggcaagcatgttgtgttc

SEQ ID NO: 962 - DNA, 30 bp, Homo sapiens
cacaggttggatggcaagcatgttgtgttc

SEQ ID NO: 963 - DNA, 30 bp, Homo sapiens
gcctggctagatggcaagcatgtggtgttt

SEQ ID NO: 964 - DNA, 30 bp, Homo sapiens
acctggttggacggcaaacatgtggtgttt

SEQ ID NO: 965 - DNA, 30 bp, Homo sapiens
tcttctggaatgtgtgacctggattgtgct

SEQ ID NO: 966 - DNA, 30 bp, Homo sapiens
tcttcttgagagtgtcacatggattgtttt

SEQ ID NO: 967 - DNA, 30 bp, Homo sapiens
aatgccttgcagtggggatgtctcataatg

SEQ ID NO: 968 - DNA, 30 bp, Homo sapiens
aatgccttgccgtagggatgtctcgagatg

SEQ ID NO: 969 - DNA, 30 bp, Homo sapiens
agtgcctttctgtcgggatgtcacacaacg

SEQ ID NO: 970 - DNA, 30 bp, Homo sapiens
agtgcctggcactgggcatgtcacacaacg

SEQ ID NO: 971 - DNA, 30 bp, Homo sapiens
gcgccgttggcatcgtagagtgaacacaac

SEQ ID NO: 972 - DNA, 30 bp, Homo sapiens
gcactgttggcactgtagagtgaacacaat

SEQ ID NO: 973 - DNA, 30 bp, Homo sapiens
cttcatcctaaagcatacgggtcctggcat

SEQ ID NO: 974 - DNA, 30 bp, Homo sapiens
cttcatcctaaagcatacaggtcctggcat

SEQ ID NO: 975 - DNA, 30 bp, Homo sapiens
ctttatcctcaagcatacgggaccaggtct

SEQ ID NO: 976 - protein, 763 aa, Unknown
  source: /note="Description of Unknown: Cas13e.2 sequence"
MKVENKEKSKKAMYLINHYEGPKKWCFAIVLNRACDNYEDNPHLFSKSLLEFEKTSRKDWFDEETRELVLKPNTTANRKLKDIRNYFSHHYHKNECLYFKNDDPIRCIMEAAYEKSKIYIKGKQIEDIPLPELFESSWITPAGILLLASFFVERGILHRLMGNIGGFKDNRGEYGLTHDIFTTYCLKGSYSIRAQDHDAVMFRDILGYLSRVPTESFQRIKQPQIRKEGQLSERKTDKFITFALNYLEDYGCKACFARSKIVREQENINKEYKPHENKKKVEIHFDQSKEDRFYINRNNVILKIQKKDGHSNVRMGVYELKYLVLMSLVGKAKEAVEKIDNYIQDLRDQLPYIEGKNKEEIKFFPRFIRSHLGLLQINDEEKIKARLDYVKTKWLDKKEKSKELELHKKGRDILRYINERCDRELNRNVYNRILELLVSKDLTGFYRELEELKRTRRIDKNIVQNLSGQKTINALHEKVCDLVLKEIESLDTENLRKYLGLIPKEEVTFKEKVDRILKQPVIYKGFLRYQFFKDDKKSFVLLVEDALKEKGGGCDVPLGKEYYKIVSLDKYDKENKTLCETLAMDRLCLMMARQYYLSLNAKLAQQIEWKKDSIELIIPDQSKQSFSIRFSVRDFTKLYVTDDPEFLARLCSYFFPVEKEIEYHKLYSEGINKYTNLQKEGIEAILELEKKLIERNRIQSAKNYLSFNEIMNKSGYNKDEQDDLKKVRNSLLHYKLIFEKEHLKKFYEVMRGEGIEKKWSLIV

SEQ ID NO: 977 - protein, 645 aa, Unknown
  source: /note="Description of Unknown: Cas13f.1 sequence"
MNGIELKKEEAAFYFNQAELNLKAIEDNIFDKERRKTNFRDVTKGEIDCLLLKLRELRNFYSHYVHKRDVRELSGEKPILEKYYQFAIESTGSENVKLEIIENDWLADAGVLFFLCIFLKKSQANKLISGISGFKRNDDTGQPRRNLFTYFSIREGYKVVPEMQKHFLLFSLVNHLSNQDDYIEKAHQPYDIGEGLFFHRIASTFLNISKFYTYQSKRLVEQRGELKREKDIFAWEEPFQGFEINGHKGVIGEDELKELCYAFLIGNQDVEGRITQFLEKFRNANSVQQVKDDEYFPANYFAESGVGRIKDRVLNRLNKAIKSNKAKKGEIIAYDKMREVMAFINNSLDEKLKPKDYKRYLGMVREKDNIKREFETKEWSKYLPSNFWTAKNLERVYGLAREKNAELFNKLEEKDWDEYSGQIKKQITIMKQRITAVLNRIAIPRGFVKRHILGIREAECEILLSKEYEELSKQFFQSKDYDKMTRINGLYEKNKLIALMAVYLMGQLRILFDFKISDKVTVKIPFSNYPSLVYTMSSKYVDNIGNYGFSNKDKDKPILGKIDVIEKQRMEFIKEVLGFEKYLFDDKIIDFADTATHISFAEIVEEKGWDKDRLTKLKDARNKALHGEILTGTDETKSLINELKK

SEQ ID NO: 978 - protein, 645 aa, Unknown
  source: /note="Description of Unknown: Cas13f.2 sequence"
MSPDFIKLEKQEAAFYFNQTELNLKAIESNILDKQQRMINFRDVTKGEIDCLLFKLEELRNFYSHYVHTDNVKELSGEKPLLERYYQIAIQATRSEDVKFELFENEKITDAGVLFFLCMFLKKSQANKLISGISGFKRNDPTGQPRRNLFTYFSAREGYKALPDMQKHFLLFTLVNYLSNQDEYISELKQYGEIGQGAFFNRIASTFLNISKFYSYQSKRIKEQRGELNSEKDSFEWIEPFQGFEINGHKGVIGEDELKELCYALLVAKQDVEGKIMQFLKKFRNTGNLQQVKDDEYFPASYFNESKKEDIKKEILGRLDKKIRSCSAKAEKAYDKMKEVMEFINNSLEEKLKRKDYRRYLKMVREKGNIEREFRTKEWSKYFSSDFWRKNNLEDVYKLATQKNAELFKNLEEKDWEEYSEQIKKQITIMKQRVTAVLNRIAIPRGFVKKHILGIREAECKILLSKKYEELSRQFFEAGNFDKLTQINGLYEKNKLTAFMSVYLMGRLNIQLDFKISDKVTEKIPFSQYPSLVYAMSRKYVDNVDKYKFSHQDKKKPFLGKIDSIEKERIEFIKEVLDFEEYLFKNKVIDFSDTATHISFKEICDEKGCNRNKLTELNNARNAALHGEIPSETREAKPLINELKK

SEQ ID NO: 979 - protein, 647 aa, Unknown
  source: /note="Description of Unknown: Cas13f.3 sequence"
MSPDFIKLEKQEAAFYFNQTELNLKAIESNIFDKQQRVINFRDVTKGEIDCLLLKLRELRNFYSHYVYTDDVKILSGERPLLEKYYQFAIEATGSENVKLEIIESNRLTEAGVLFFLCMFLKKSQANKLISGISGFKRNDPTGQPRRNLFTYFSVREGYKVVPDMQKHFLLFVLVNHLSGQDDYIEKAQKPYDIGEGLFFHRIASTFLNISEFYIYQSKRLKEQQGELKREKDIFPWIEPFQGFEINGNKGIIGEDELKELCYALLVAGKDVEGKITQFLEKFKNADNAQQVEKDENFPANYFAESNIGSIKEKILNRLGKTDDSYNKTGTKIKPYDMMKEVMEFINNSLDEKLKRKDYRRYLKMVREKDNIKREFESKEWSKYFSSDFWMAKNLERVYGLAREKNAELFNKLEEKDWQEYSGQIKKQITIMKQRITAVLNRIAVPRGFVKEHILGTREAKCKILLSKEYEELSKQFFQTRNYDKMTQVNGLYEKNKLLAFMVVYLMERLNILLDFKISDKVMAKIPFSQYPSLVYAMSSKYADSVGSYKFENDEKNKPFLGKIDTIEKQRMEFIKEVLGFEEYLFEKKIIDFADTATHISFDEICNEKGWDKDKLTKLKDARNAALHGEIPAETREAKPLINGLKK

SEQ ID NO: 980 - protein, 642 aa, Unknown
  source: /note="Description of Unknown: Cas13f.4 sequence"
MNIIKLKKEEAAFYFNQTILNLSGLDEIIEKQIPHIINFKDVARTEIEAILLKLVELRNFYSHYVHNDTVKILSGEKPILEKYYQIAIEATGSKNVKLVIIENNCLTDSGVLFLLCMFLKKSQANKLISSVSGFKRNDKEGQPRRNLFTYYSVREGYKVVPDMQKHFLLFALVNHLSEQDDHIEKQQQSDELGKGLFFHRIASTFLNESQFYTYQSNRLKEKRGELKHEKDTFTWIEPFQGFTLNGHKGVISEDQLKELCYTILIEKQNLEGKIIQFLKKFQNVSSKQQVDEDEYFPANYFGRAGTGTLKEKILNRLDKRMDPTSKVTDKAYDKMIEVMEFINMCLDEKLRQKDYRRYLKMVREKHNIKREFDSKKWTRFLPTELWNKRNLEEAYQLARKENKKKLEDMQEKDWVEYSGQIKKQITIMKQRITAVMNRIALPKGFVKNHIQIREDYCKIELSGKYEELSRQFFDKKNFDKMTLINGLCEKNKLIAFMVIYLLERLGFELTYKISDKVKEDIPLSYYPKLVYAMNRKYVDNIDSYAFAAYESKKAILDKVDIIEKQRMEFIKQVLCFEEYIFENRIIEFNDEETHISFTQIHDEKGRDTEKLSKLKHARNKALHGEIPDGTEKAKLLINEIKK

SEQ ID NO: 981 - protein, 647 aa, Unknown
  source: /note="Description of Unknown: Cas13f.5 sequence"
MNAIELKKEEAAFYFNQARLNISGLDEIIEKQLPHIGNSRDIARGELEALLLKLVELRNFYSHYVHKDDVKTLSGEKPLLDKYYEIAIEATGSKDVRLEIIDDKKLTDAGVLFLLCMFLKKSEANKLISSIRGFKRNDKEGQPRRNLFTYYSVREGYKVVPDMQKHFLLFTLVNHLSNQDEYISNLRPNQEIGQGGFFHRIASKFLSDSKFYTYRSKRLTEQRGELKPKKDHFTWIEPFQGFSVQGQKGVIGEEQLKELCYVLLVAREDVEGKVTQFLKKFQNANNVQQVEKDEYFPANYFENRDVGRVKDKILNRLKKITESYKAKGREVKAYDKMKEVMEFINNCLDENLKLKDYRRYLKMVREKENIKREFDSKKWERFLPRELWQKRNLEDAYQLAKEKNTELFNKLEEKDWQEYSGQIKKQITIMKQRITAVLNRIALPKGFVRKHILIRQSQCPIILSNNYMKLAKEFFEERNFDKMTQINGLFEKNVLIAFMIVYLMEQLNLRLNFTITDKVTEKVQISQYPSLVFAINREYVDGISGYKLPPKKPKEPPYTFFEKIDAIEKERMEFIKQVLGFEEHLFEKNVIDFTDTATHISFNEICDEKGWDENKIIKLKDARNAALHGKIPEDTDEAKVLINELKK

SEQ ID NO: 982 - protein, 692 aa, Unknown
  source: /note="Description of Unknown: PpeCas13b1 sequence"
MNIPAVENQKKYFGTYSVMAMLNAQTVLDHIQKVADIEGLYNAKNGYDKNQREYSFEVLKRAFGVLKMYRDLTNHYKTYEEKLNDGTEQPLSGMINNYYTVALRNMNERYGYLSLQDYNHLSGVGIALLICLFLDKQYINIFLSRLPIFSSYNAQRRIIIRSFGINSIKLPDRIHSEKSNKSVAMDMLNEVKRCPDELFTTLSAEKQSRFRIISDDHVLMKRSSDRFVPLLLQYIDYGRFHVNMGKLRYLLKADKIDGQTRVRVIEQPLNGFGRLEEAETYILENNKVEMFIIPCRMSTLEIPAMAFHMFLDVHNRYKRLFQAMQKEEVTAENDLPQKILDLISGNGKDVDAFIRLTVDDMLADNKMGKRGFKAKDIVLFQPSVNENKITGLNYRIMQSAIAAKQQFKLMFEKARLIGKLYKVFARSIPANAVEFYERYLIERKFYLTGLNRVDVPFIRRDQNRIYSEDLPVELPRQMFDNEIKSNVTYLIAEYMKRVLDDDFQTFYQWNRTERYQKSEKVIRRYRVQDALLFLLAKKTLTELADFFAEKGILSEMPMSFTFSEGMKLKNYGDFFVLASDKRIGNLLELVGSDIVSKEDIMEEFNKYDQCRPEISSIVFNLEKWAFDTYPELRVDREEKVDFKSILKIKNINKEQSDILRKIRNAFDHNNYPDKGEIAMSIKKAFGEYAIMK

SEQ ID NO: 983 - protein, 709 aa, Unknown
  source: /note="Description of Unknown: CcaCas13b1 sequence"
MKNIQRLGKGNEFSPFKKEDKFYFGGFLNLANNNIEDFFKEIITRFGIVIETFGEKILNEYLEEMQRDVMKELLKTVEALRNFYTHYDHEPIKIEDRVFYFLDKVLLDVSLTVKNKYLKKTKEFDFICKREPISQKGIVFLLSFFLNKGEIYALTSNIKGFKAKITKYMATHRMFSFLAYKGLRKIRTSEEKETLMLQMLDELNKVPDVVYQNLSEDVQKTFIEDWNEYVIRKRYEDKFNYFAIRFLDEFRFQVHLGNYLCDKRTKQICDTTTEREVKKKITVFGRLSELENYDFPKNKIGIRVPVVFIGQPAYLSMNDIHSVLYEFLINKIVEKIETQIKQIIGATTKILKPYTNANREKLLRDLEQEQQILKDKKDKKSKRKHELYANDIKRFMPKAFKEQWRGYHHSLLQKYLASKEELKNLLPKEFKLKGYFQQQYLNQFYTDYLKRRLSYVNELLKATEKECFKFFRKQNNIQIQSILVYPIFLKRGFLDEKPTMDTELADWFMHYKNYKEDNYQKFYAYFKRNKQINKQKKNDVYTLMMVEYIIQKIFGDLNLNGILNQKDIKIQGKITVKGVKLKDIGNFRKYEIDQRVNTFLDYEPRKEQGQLPPNNVIDRQISKYETVRSILLKDVQELEKIISDEIKEERHDLKQYYNFKYYILNATDLEQKAFVLTYIRNKFAHNQLPKKETYAEYFAEVFKREALIK

SEQ ID NO: 984 - protein, 697 aa, Unknown
  source: /note="Description of Unknown: PxiCas13b1 sequence"
MTNTPKRRTLHRHPSYFGAFLNIARHNAFMIMEHLSTKYDMEDFGCLKKRYGKEKQQNAEFTLKGFFRLLNQMRNNYSHYISNTDYGKFDVQDIYEAAIFRLLDRGKHPRSLANSHENTVAFVTCLFLERKYAFPFLSRLDCFRSTNDARKASHECYTMFCCRLPPKLESSDILLDMVNELGRCPSALYNLLSEEDQARFHIKREEIIVLKRHSDRFPYFALRYFDDTRFDVYLGRWRTKPVYKKIYGQERDRVLTQSIRTFTRLSRLLPYNFGDQVIGLKFLVNETAAIISTHEIRSLFLYHYLSKKPQYIDTIKLFFEDIKSGELQPIADPPRGDKEKTQEERAQYRERQKEIKERRKELNAQRKEVKKRIKDIEKMAEDIVFLTPPKMPQKLNNDQFRIMQSSLANKKAIKKFFQKETGIGLLYRIDVGRCRGILDFYTGYLKYKMDWLDDAAKKYEKYLPSSIQHKTLDYTRLPVYLPRGLFKKAIVKPEEDNVIFCLDQLLDGDTQDFYNWQRLDREQYLRAVQAEDRALWLMIQERQKQKAEHLILTEIDARLRIDTKVDITDKLPLRRYGDLRRVAKDRRLVNLASYYHVAGLSEIPYDLVKKELEEYDRRRVAFFEHVYQFEKEVYDRYAAERNENPKYFSHWEYVAVTHFNELFKEKVMQLRNKFHHNEFPYFDDVAEGYYQKMRKRQ

SEQ ID NO: 985 - protein, 723 aa, Unknown
  source: /note="Description of Unknown: PgiCas13b1 sequence"
MNTVPENKGQSRTVEDDPQYFGLYLNLARENLIEVESHVRIKFGKKKLNEESLKQSDSQIEKQRLIRELYSLLDFLRNDFSHNRLDGTTFEHLVSPDISSFITGTYSLACGRAQSRFAVCLTVSGFAFFICLFLDREQASGMLSRIRGFKRTDENARAVHETFCDLCIRHPDRLESSNTKEALLLDMLNELNRCPRILYDMLPEEERAQFLPALDENTKRIRHQDRFPYLMLRFIEEMRFRVDLGEIELDSYSKKVGRNGEYDRTITDHALAFGKLSDFQNYAIYDNKIGYCHALSNPQSGFISVHDLRKLLLMELLCEGSDFLRKANRILDETAEGKLQFSALFPPKSKDRREKAETTLEKYKQEIKGRKDKLNQLNEDCRLRLRKFRKDGDSQDIVRMIISEKKLITSAYYNEMQRSLANRRQFRAIVAELRLLDPLSATMETAHRYTEGFYKCYLEKKREWLAKIDGEARKLLPLLIRRRMQDWIRNKQAHPIDLPSHLFDSKVMEKWNEAFKDWWSTKYPDGMQPFYGLRRNEREFMLRLVQEDDRLMLMAINKMMTDREEDLILDENQFSLAVEGEGGDNSEIKSKRKDWSKYIRYRYDRRVPGLMSHFPEHKATLDEVKTLLGEYDRCRIKIFDWAFALEGAIMSDRDLKLHESSSSGEHSTLVKMGCLTPDESQYLILIRNKAAHNQFPCAAPEGSSLVDSLWKEMIIRKILPILD

SEQ ID NO: 986 - protein, 724 aa, Unknown
  source: /note="Description of Unknown: BpyCas13b1 sequence"
MESIKSQKSTGKTLQKDPPYFGLYLNMALLNVRKVENHIRKWLGDVALLPEKSGFHSDKKSYESSLLKEVYGKLQDIRNAFSHYHIDDQSVKHTISSEMHRFIENAYSFALQKTRARFTGNEKLKDNALIFLICLFLDREEAFKFLSRATGFKSTKEKFLAVRETFCALCCRQPERLLSVNPREALLMDMLNELNRCPDILFEMLDEKDQKSFLPLLGEESKRVRYKNRFPYLMLRYIEEKRFRIDLGCLELASYPKKMGEENNYERSVTDHAMAFGRLTDFHNYAIYNNKIGFVRTLQNTKSGFISIYDLRKILLLSFLDKDKGLLEQCEKHWKDLSENLDAIRTELQKEFPKGGKLVSSKLADKQEKYESEFERRKEKLTLKLDCRERLRVFEKREKAKDIIRMVIDQKQRITSAYYSEIQRCLANRRHLDSIIRELRLKDTLGKVLRPGLGHTEKLYQRYFEEKKEWLEATPTGKQKELPLIIRNLMRDWKQRKNSHPIDLPSQLFENEICRKWNEMFKLYWDKEFPNGMQRFYRCKRNEKEYQLRLLCEDDRLLFMAVRDLYDWKEAQLMLGEVSVSQVIEGGQPDKAECKLKDVSKLMRYCYDGRVKGLMPYFANHEATQEQVEMELRHYEDHRRRVFNWVFALEKSVLKNEKLRYEESQGGCEHRRCIDASLVSEEEYEFLVHIRNKSAHNQFPNVTSGFCECIWSKAIICRIIPFID

SEQ ID NO: 987 - protein, 717 aa, Unknown
  source: /note="Description of Unknown: PspCas13b1 sequence"
MSKECQRQEKKRRLQKANFSLTGKHVFGAYFNMARTNFVKTINYILPIAGVRGLTTEQKQWEKDHKAYLLDIICLMADTLTECRNFYTHKDPYNKPSQLAHQEMIAKKLDKVVVASRRILKDREGLVTTKDDKALSDFGLLYFCVLFLSKPYAKLFIDEVRLFEYSPFDNMIMSEMLSIYRIRTPHKIDSHDSKATLAMDIFGELRRCPMELYNLLDKNAGQPFFHDEVKHSKRLRYDDRFPTLALRYIDETRFQLQLGSFRYKFYDKEIDGRVRVRRIQKEINGYGRMQEVADYNIHANRIGLYWPAPCALSVYDLPAMLFYEYLREQQEYEDDYRKFFKAVAEGKLKPFKRPKDIPKKLQLFLCSHYERLDRLTLQHLEEREKDNQYGKKSFSAQSMMEWQPTKLHDKLTGLNYNVLTAYLAGFTPRTLEQVLINAHLIGGINKVLALGNRNIEELYLHYLEEELKHIRSRSDKALSALPFIHHDRMALAARYTTIQLPDGLFTPYILENAAYLITLFYQTVLKDNAQPFYLSDKVDDYKDNERTLRRYKTQDMVLFLLAEKMFTNIISEMFLRQLTFRVPVQENMSLKNYGEFYRFLTDDRLMSLLNNIVETGDLVIRHTDLMSELAAYDQYRSTIFMLIQSIENLIITNNAVLREDLPKRNNFASLLELVELTDDERKLLVAIRNAFSHNSYNIDFEVAKGILQHLQSVEITK

SEQ ID NO: 988 - protein, 698 aa, Unknown
  source: /note="Description of Unknown: BzoCas13b1 sequence"
MENKTSLGNNIYYNPFKPQDKSYFAGYFNAAMENTDSVFRELGKRLEYTSENFFDAKEVPKKNFKGIIKAVRDLRNFYTHKEHGEVEITDEIFGVLDEMLKSTVLTVKKKKVKKTKEIVYIDKKKPISKNGVVFLLSLFLTKQEIHAFKSKIAGFKATVIDFMATHEIFSHLAYKKLRKVRTAEAKETLMMQMLDELSKVPDVVYQNLSEDVQKTFIEDWNEYVIRKRYEDKFNYFAIRFLDEFRFQVHLGNYLHDSRPKENLISDRRIKEKITVFGRLSELEHYDFPKGKIGIKVAIVFGGQPAYLSMNDIHSILYEFFDKWEKKIVGKIQAQIQQIIDTNAKILKPYQDGNKEKLIKDLKQEQNILQRKYPEAPARKEVLYANDIKRFMPTDFKNEWKGEQHSLLQKSLACKEELKNLLPEKFKLGGYFQQKYLYQFYTCYLDKRLEYISGLFKKVENECFKFLKKQNDARVQSILGYPIFLERGFMDEKPTIEALFADWFRYYKEYQNFQTFYDTENRKRKTKIYQQKKNDVFTLLMAKHIFKSVFKQFNTNYIWNKVDLKLDGKITVENVKLKNVGDFIKYEYDQRVQAFLKYEENIEYPYVVEREIEQYEKVRRELLKEVHLIEEYILEKVKDKEILKKNQNFKYYILNATDLEQKAFVLTYIRNKFAHNQLPKKETYAEYFAEVFKKEALIK

SEQ ID NO: 989 - protein, 707 aa, Unknown
  source: /note="Description of Unknown: PtoCas13b1 sequence"
MESIIGLGLSFNPYKTADKHYFGSFLNLVENNLNAVFAEFKERISYDENISSLIEKELENKKNFIILAEAIEKLRDYYTHFYHDPITFEDNKEPLLELLDEVLLKTILDVKKKYLKKTKEIGLLYEDKPLSTSGLVFLMSLFLSKKEIEDFKSNIKGFKGKVVKYMATHRVYSILAFKGLYRIKTDTSKETLMMQMIDELSKVPDCVYQNLSETKQKDFIEDWNEYVIRKRYEDKFNYFAIRFLDEFKFQVFMGYYIHDQRTKTIGTNITTERTVKEKINVFGKLSKMDNYNFLTNNIPIYLFHQGDPAILSLNEIPALLHLFLVKPNIIRIKIEKQFKAINHPGIPKSLFADTNVRAIKLKKDLEAELDMLNTPKNKRPELRKYVFYANDIKRFMPKDFKTKWKGCQHSELQRKLATKQDIKELLSGCLDINAYFQKDNFEDFFSKYLENRIETLEGVLKGVFKNCFKFLKRQNEIIKKRILAKPTFLPRGVFDERPTMKNEFAEWFVEYLENKDYQKFYNAEEFKKNAVIKKQKLKDFYTLQMVNYLLKEVFGKLNQTYIWNKVPVSFNGKVTIDKVKLKNIGKYKRYERDERVKTFIGYEVDEKRYSVKPINVIDLQIQEYEEIRSELLKEIQNLEQYIYDHTTDKNILLQNPNFKMYVLNCSELEKKTIILIAIRNKFAHNQLPNKMTYANYYLKVLKKSDLA

SEQ ID NO: 990 - protein, 708 aa, Unknown
  source: /note="Description of Unknown: FcoCas13b1 sequence"
MSSKNESYNKQKTFNHYKQEDKYFFGGFLNNADDNLRQVGKEFKTRINFNNELASVFKDREIFELLLDTIKKLRDYYTHHYHKPITINPKIYDFLDDTLLDVLITIKKKKVKTSRELPFLEENKTLTQSGLVFLMSFFLHRKEFQVFTSGLEGFKAKVNTYMITHWSYSYYNFKGLHRIKTDQTKEALLTQIVDYLSKVPNEIYETLSEKQQKEFEEDINEYVIRKRYENKFNYFAMRFLDEYRFMVNFGDYIKDRQKKILEIQFDSERIIKKEIHLFEKLSLVTEYVMANNNIPFYIKDLQQRSTGLLSCNELPSMLYEVIVKKIAQKIREQYQSIRDFTDNIPTTLIKTINTDIPRLKNAIQKELTLTQKNKVDDKKLQRKYVFYASDLIHFMKNKSLWKGYMHNELQSFLAKKNDCIALLETVFNLTKGLKNLFLKHGNFIDFYKEYLKLKEDFLNTELSKRFKYIFIVFQKRQEEKKNNLYADAINLSRGIFDEKPTMPDEFASWFVASYQYNNYQSFYELTYKNLRAINKVKIQDYYLKLMVDTLYQDLFNQLNDSSLWNKIHLSLNNRITANPKLKDIGKYKRALQDEKIATLLTYDDRTDYKELHYTALNMELQEYEKVRSELLKQVQELEKQILEEYTDFPADFERNPNFKKYLAHTNPIIKKAIVLIIIRNKMAHNQYPPKFYFATYFNRVFETKELWE

SEQ ID NO: 991 - protein, 706 aa, Unknown
  source: /note="Description of Unknown: RanCas13b2 sequence"
MEKPLLPNVYTLKHKFFWGAFLNIARHNAFITICHINEQLGLKTVDVVCETWNNEGKKKGIEALEILVNQLHSLRNYYSHYKHKKPDAEKDIFKHLYKAFDASLRMVKEDYKARYRFEKDFFTESGLLFFTNLFLDKRDAYWMLKKVSGFKASHKQEKMTTEVFCRSRILLPLRLESRYDHNQMLLDMLSELSRCPKLLYEKLSEENKKHFQVEADGFDTLIRHQDRFPYFALRYLDLNRFQVDLGTYHYCIYDKKIGDEQEKRHLTRTLLSFGRLQDFTEYHITDNKIGFRLPYNSGFVAAFISVHELLPLMFYQHLETVRHIQRIYKDFEEERINTIEDLEAFPKQMLGLLQNKQPDLSEKAKIKIEKLISSPKLGKRREKVKDFMRFQPVAYSSKANSTEFWFIRRALAEKNRLEGYFKQTNLIGNLNKFNWKACRNLVDFYQQYLEQREKFLEAIQPWEPYQYCLLLKIPKKGWEQGGISLPRGLFTEAIREFISRAITLYFKEKYQDKHQSFYNLSYQHLEKKLRLYRNQDVMLWLMTLELTKNHFKELAKLNPLNQLPMVLPVFGEVQYHEEHTKALKMGNFKALVKDRRLNGLFSFIKEENQKHPISQLRLRRELEIYQSLRVDAFKETLSLEEKLLNKHTSLENEFRALLEESMVTDEHIAFIASVRNAFCHNQYPFYKGIAEALLKVLREEIVKSQI

SEQ ID NO: 992 - protein, 703 aa, Unknown
  source: /note="Description of Unknown: PsaCas13b2 sequence"
MEDKPFWAAFFNLARHNVYLTVNHINKLLDLEKKLDIKKIWDDERTTIDKSMFFRLLQILEQLRNYYSHVKHSKSATMPNFDEDLLNWMRYIFIDSVNKVKEDYSSYPFTSKDSINAFGLLFFVSLFLEKQDSIWMQKKIPGFKKASENMKMTNEVFCRNHILLPIRLETVYDKDWMLLDMLNEVVRCPLSLYKRLTPAAQNKFKVPRILVRHQNRFPYFVLRFFDLNRFQINLGCYHFAICKKQIGDKKEVHHLIRTLYGFSRLQNFTQYQIENEKIGIKITLTPGFKAVFLSVHELLPMMFYYLLLCEGDTRNAIFNLYDAFVQEKINTITDLEHLPKQMIDLLKGHQRDMLKAVEQKKAMLIQETDVAAKNTGTVNDMMRFQPVKRCSKANSTEYQMLQRAFADSCRLSRYFTQLHLIHSLSRFEYDKQPNLIAFYAAYLKAKLEFLNELQNWASDNYFLLLRAPKEGWKNGFNLPRGLFTEKIKTQVARLIPVFFDKKFKDHSQPFYRYDFKKFERELRLIKNQDILIWLMCKNLFDEKIKPIGSLNALAKVPMTLAIKGKAGNNEEEGTKLLKWGNFKTLLADRRIKGLFSYIEHDDKQHPLTKRRVDLELDLYQTCRIDIFQQTLGLEAQLLDKYSDLTDNFYQMLIGPRNIKEDTDFLKDVRNAFSHNQYPDSKGIATQMYKEVEKNRIKRIELFD

SEQ ID NO: 993 - protein, 723 aa, Unknown
  source: /note="Description of Unknown: PbuCas13b2 sequence"
MQKQDIMENKEKPEPIYYELTDKHFWAAFLNLARHNVYTTINHINRRLEIAEMMGIKGSWNENSKSPNKNVLFIFLEKLQVLRNYYSHYKYSEESPKPIFETSLLKNMYKVFDANVRLVKRDYMHYHFADKENMTIAGLLFFVSLFLDKKDAIWMQKKLKGFKDGRNLEQMTNEVFCRSRISLPLKLENVQTKDWMQLDMLNELVRCPKSLYERLREKDRESFKVPFDIFNTLVRHQDRFPYFVLRYFDLNRFQIDLGTYHFSIYNKRIGDEDEVRHLTHHLYGFARIQDFAPYHLENEKIGIKFNLGTQFTAAFLSVHELLPMMFYYLLLTKDKEISNIYAIYDAFANNEINSIADLTHLPKQMISILKGRQKDMGKEAERKIGEMIQKIRIGKRNAGVNDMMRFQPVQKNSKANSTEYRMLQRALAENFRLKAYFNQMNLVGNLAETQWEHQTNILSFYRNYLEARKKYLKGLQNWKQYQHFLILKVQKTGWKNSFNLPRGIFTQPIREFVAKAIPLYFAEEYKDNVQPFYDYPFKKFERELRLIKNQDIVTWLMFKELFNMATVEIESNNILNRMPMKLPVKGNILKETETKVLKQGNFKALVKDRRLNGLFSFAETTDEEHPISKLSVDLELIKYQTTRISIFEMTLGLEKKLIDKYSTLTDSFRNMLERRPELKNYVNSLIAVRNAFSHNQYPMYDNIAPQLLEIVGKKEIEKSENKN

SEQ ID NO: 994 - protein, 722 aa, Unknown
  source: /note="Description of Unknown: PguCas13b2 sequence"
MTEQSERPYNGTYYTLEDKHFWAAFLNLARHNAYITLTHIDRQLAYSKVLSFKALWKNESKSSGKSILFDFLQKLKDFRNYYSHYRHSGSSELPLFDGNMLQRLYNVFDVSVQRVKRDHEHHHFVDSEMVTEAGLLFFVSLFLEKRDAIWMQKKIRGFKGGTGPEQMTNEVFCRSRISLPLKLESLRTDDWMLLDMLNELVRCPKPLYDRLREKDRACFRVPVDILNTLVRHQDRFPYFALRYFDLKRFHIDLGTYHFAIYKKMIGEQPEDRHLTRNLYGFGRIQDFAEYHIEKGKIGLRFAQDKRLTAAFLSVHELMPMMFYYFLLREKRVIEDVYAIYDAFARDEINTLKELDHLPKQMITILSQERKDMKEKIRKKLQEMIRKIRIGRKNAGVRDMMRFQPVAKNSKANSTEYRMLQRALAEKERLTPYFRQMNLTGGLHETRWESHTNILSFYRSYLRARKAFLERISDRVENCPFLLLKEPKAGWKDEFHLPRGIFTEAVRDFMAKAVPLYFERACEDRVQPFYDSPFIKDAQKFERELRLVKNQDIITWMMCRDLMEENKVELGSLNVLNRKPMRLPVRGHVHKERNTKLLKQGNFKSFVKDRRLNGLFSFVDTGGEQYPISKLRVEYELAKYQTARVCVFELTLRLEESLLSRYPHLDESFREMLESWPELHGKVRLLIAVRNAFSHNQYPMYDNIAHRLSEEVKQETVERIIQA

SEQ ID NO: 995 - protein, 846 aa, Unknown
  source: /note="Description of Unknown: AdmCas13d sequence"
MNNKRKTKAKAAGLKSVFFDQKQAVLTTFAKGNNSQIEKKVVNSEVKDLRQPPAFDLELKEKTNINTSRSASLPLSKRQRIRAERIKRVKRVGEDDLRAKADLEKHYFGKEYSDNLKIQIIYNILDINKIISPYINDIVYSMNNLARNKIDVIGSLSSTTDYSSFMSPNKDLEKEKKFSFHRENYKKFVEKPYMRYYGKVFIGKGEKIEVMYRDEEIFTIFQILSYVRQSIMHNDIGNKSSILAIEKYPARFVGFLSDLLKTKTNDVNRMFIDNSQTNFWVLFSIFGQDHTKICRNFYDFVIKADSKNLGFSLKKIRELMLDLPNANMLRDHQFDTVRSKFYTLLDFIIYQHYLEEKSRIDNMVEKLRMTLKEEEKEVLYAAEAKIVWNAIGAKVVPMMNGDALKEIKRKNRDRATVQVNSDANVFSGLIYFLTLFLDGKEINEMVSNLITKFENIDSLLHVDREIYKSDEISKSFSIFQSAERIIEELKFIKNVTRMDNEIFPSEGVFLDAANVLGVRGDDSNEFVGDDLHSDANKNKINKEDRNLRNFIINNVVKSRRFQYIARHMNTHYVKQLANNETLNRFVLNKMGDAKIINRYYESISGNTPNIEVRSQIDYLVKRLRSFSFEDLNDVKQKVRPGTNESIEKEKKKALVGLCLTIQYLVYKNLVNINARYTTAFYCLERDSKLKGFGVDVWRDFESYTALTNHFIKEGYLPVRKAEILRANLKHLDCDGFKYYRNQVTHLNAIRVAYKYINEIKSVHSYFALYHYIMQRHLYDSLQADSSGFVIDALKKSFEHKIYSKDLLHVLHSPFGYNTARYKNLSIEALFDKNESRPEVNPLSTND

SEQ ID NO: 996 - protein, 838 aa, Unknown
  source: /note="Description of Unknown: UrCas13d sequence"
MAEKKKSSVKAAGMKSILVSENKMYITSFGKGNSAVLEYEVDNNDYNQTQDNSNIQLGGVNEVNITFSSKHGFESGVEINTSNPTHSSPVRGDMLGLKSELEKRFFGKTFDDNIHIQLIYNILDIEKILAVYVTNIVYALNNMLGVHDDFIGYLSTNNIYDVFIDPDNSSLSDDKKANVRKSLSKFNALLKTKRLGYFGLPKTKDNRVSQAKKRVYHMLAIVGQIRQCVFHDKSGAKRFDLYSINNIDPEYRDTLDYLVEERLKSINKDFIEDNKVNISLLIDMMKYEADDIIRLYYDFIVLKSQKNLGFSIKKLREKMLDEYGFRFKDKQYDSVRSKMYKLMDFLLFCNYYRNDIAAGESLVRKLRFSMTDDEKEGIYADEAAKLWGKFRNDFADHMNGDVIKELGKADMDSEKKNASDLLYFSKMIYMLTYFLDGKEINDLLTTLISKFDNIKEFLKIMKSSAVDVELTAGYKLFNDSQRITNELFIVKNIASMRKPAASAKLTMFRDALTILGIDTDDRISGILKLKEKGKGIHGLRNFITNNVIESSRFVYLIKYANAQKIREVAKNEKVVMFVLGGIPDTQIERYYKSCVEPDMNSSLGVKRSELARMIKNISFDDFKNVKQQAKGRENVAKERAKAVIGLYLTVMYLLVKNLVNVNARYVIAIHCLERDFGLYKEIIPELASKNLKNDYRILSQTLCELCDKSPNLFLKNERLRKCVEVDINNADSSMTRKYRNCIAHLTVVRELKEYIGDICTVDSYFSIYHYVMQRCITKRENDTKQEEKIKYEDDLLKNHGYTKDFVKALNSPFGYNIPRFKNLSIEQLFDRNEYLTEK

SEQ ID NO: 997 - protein, 840 aa, Unknown
  source: /note="Description of Unknown: P1E0Cas13d sequence"
MVKKPKSLAKAAGLKSTFVIEKELAMTAFGRGNDALLQKRIVDGVVRDVAEKQQFQVQRQDESRFRLQNSRLADRTVTADDPLHRQPLGADQLRRKAILEQKYFGRTFDDNIHIQLIYNILDIHKMLAVPANHIVHTLNLLGGYETDFVGMLPAGLPYDKLRVVKKKNGDTVDIKADIAAYAKRPQLAYLGAAFYKRDAARGRVKREQDVYAILSLMSLLRQFCAHDSVRIWGQNTAALYHLQALPQDMKDLLDDGWRRALGGVNDHFLDTNKVNLLTLFEYYGETKQALTQDFYRFVVLKEQKNMGFSLRRLREELLKLPDAAYLTGQEYDSVRQKLYMLLDFLLCRLYAQERADRCEELVSALRCALSDEEKDTVYQAEAAALWQALGDTLLPLLKGKKLQDKDKKKSDELGAQQGSRANADYFCRLMHLSTWFMDGKEINTLLTTLISKLENIDSLRSVLESMGLAYSFVPAYAMFDHSRYIAGQLRVVNNIARMRKPAIGAKREMYRAAVVLLGVDSPAAAITDDLLQIDPETGKVRARDTGLRNFIANNVVESRRFTYLLRYMTPEQARVLAQNEKLIAFVLSTVPDTQLERYCRTCGREDITGRPAQIRYLTAQIMGVRYESFTDVEQRGRGDNPKKERYKALIGLYLTVLYLAVKNMVNCNARYVIAFYCRDRDTALYQKEVCWYDLQVEDYTALTRYFVSQGYLNRHACGYLRSNMNGISNSLLTAYRNAVDHLNAIPPLGSLCRDIGRVDSYFALYHYAVQQYLNGRYYRKTPREQELFAAMAQHRTWCSDLVKALNTPFGYNLARYKNLSIDGLFDRDHVVREDGEKPAE

SEQ ID NO: 998 - protein, 844 aa, Unknown
  source: /note="Description of Unknown: RffCas13d sequence"
MNSRNKTAVKAAGLKSTIISGDKLYMTSFGKGNAAVIEQKIDINDYSFSADTPSLEVDKAESKEISFSSHHPFVKNDKLTTYNPLYEKPVGRDMLGLKDKLEERYFGCTFNDNLHIQIIYNILDIEKILAVHSANITTALDHMVDENSDYIGYMNTINTYDVFMDPSKNSSLSPKDRKNIDNSRAKFEKLLSTKRLGYFGFDYDANGKDKKKNEEKKRLYHLTAFAGQLRQWSFHSAGNYPRTWLYKLDSLDKEYLDTLDHYFDKRFNDINDDFVTKNATNLYILKEVFPANFKDIADLYYDFIVIKSHKNMGFSIKKLREKMLECDGADRIKEQDMDSVRSKLYKLIDFCIFKYYHEFPELSEKNVDILRAAVSDTKKDNLYSDEAARLWSIFKEKFLGVVWVTGEHEKDITDAYRNRSNVSYFSKLMYAMCFFLDGKEINDLLTTLINKFDNIANQIKTAKELGINTAFVKNYDFFNHSEKYVDELNIVKNIARMKKPSSNAKKAMYHDALTILGIPEDMDLDEELDLILEKKTDPGKPLKGKNPLRNFIANNVIENSRFIYLIKFCNPENVRKIVNNTKVTEFVLKRIPDAQIERYYKSCTDSEMNPPTEKKITELAGKLKDMNFGNFRNVRQSAKENMEKERFKAVIGLYLTVVYRVVKNLVDVNSRYIMAFHSLERDSQLYNVSVDNDYLALTDTLVKEGDNSRSRYLGNKRLRDCVKQDIDNAKKNSITKYRNNVAHLTAVRNCAEFIGDITKIDSYFALYHYLIQRQLAKGLDHERSGFDRNYPQPLFKWHTYVKDVVKALNAPFGYNIPRFKNLSIDALFDRNEIKKNDGEKKSDD

SEQ ID NO: 999 - protein, 855 aa, Unknown
  source: /note="Description of Unknown: RaCas13d sequence"
MENKHKSAAKALGLKSGLVIGDELYLTSFGRGNEAKLEKKISGDTVEKLGAFEVAERDESTLTLESGRIKDKTARPKDPRHGKFKEDMLGIRSVLEKKIFGKTFDDNIHVQLAYNILDVEKIMAQYVSDIVYMLHNTDKTNDNLMGYMSIRNTYKTFCDTSNLPDDTKQKVENQKREFDKIIKSGRLGYFGEAFMVNSGNSTKLRPEKEIYHIFALMASLRQSYFHGYVKDTDYQTTWAYTLEKGPSHEFRETIDKIFDEGFSKISKDFGKMNKVNLQILGELYGIERQNLTCDYYDFIQLKKHKYLGFSIKRLRETMLETTPAECYKAECYNSERQKLYKLIDFLIYDLYYNRKPARIEEIVDKLRESVNDEEKESIYSVEAKYVYESLSKVLKNSVSGETIKDLQKRYDDETASQHSISGNVNCFCKLIYIMTLMLDGKEINDLLTTLVNKFDNIASFIDVMDELGLEHSFTDNYKMFADSKAICLDLQFINSFARMSKDDEKSKRQLFRDALVILDIGNKDINNYLDDIFKLDKEGNKLKGARHDFRNFIANNVIKSSRFKYLVKYSSADGMIKLKTNEKLIGFVLDKLPETQIDRYYESCGLDNAVVDKKVRIEKLSGLIRDMKFDDFSGVKTSNKAGDNDKQDKAKYQAIISLYLMVLYQIVKNMIYVNSRYVIAFHCLERDFGMYGKDFGKYYQGCRKLTDHFIEEKYMKEGKLGCNKKVGRYLKNNISCCTDGLINTYRNQVDHFAVVRKIGNYAAYIKSIGSWFELYHYVIQRIVFDEYRFALNNTESNYKNSIIKHHTYCKDMVKALNTPFGYDLPRYKNLSIGDLFDRNNYLNKTKESIDANDSQ

SEQ ID NO: 1000 - protein, 863 aa, Unknown
  source: /note="Description of Unknown: EsCas13d sequence"
MKKDNKSMAKAAGVKSVFAVGNTVYMTSFGRGNDAVLEQKIVDTSHEPLNDDPAYQLNVVTMNGYSVTGHRGETVSAVTDNPLREQSVPTDMLCLKPTLEKKFFGKEFDDNIHIQLIYNILDIEKILAVYSTNAIYALNNMSADNSDFFMKRTTDETFDDFEKKKESTNSREKADFDAFEKFIGNYRLAYFADAFYPKGKAKNVLREDKELYSVLTLIGKLRHWCVHSEEGRAEFWLYKLDELKDDFKNVLDVVYNRPVEEINNRFIENNKVNIQILGSVYKTDIAELVRSYYEFLITKKYKNMGFSIKKLRESMLEGKGYADKEYDSVRNKLYQMTDFILYTGYINEDSDRADDLVNTLRSSLKEDDKTTVYCKEADYLWKKYRESIADALDGDNIKKLSKSNIEIQECFISYADSVSEFTKLIYLLTRFLSGKEINDLVTTLINKFDNIRSFLEIMDELGLDRTFTAEYSFFEGSTKYLAELVELNSFVKSCSFDINAKRTMYRDALDILGIESDKTIEKMIDNILQIDANGDKKLKKNNGLRNFIASNVIDSNRFKYLVRYGNPKKIRETAKCKPAVRFVLNEIPDAQIERYYEACCPNTALCSANKRREKLADMIAEIKFENFSDAGNYQKANVTEAEIKRKNQAIIRLYLTVMYIMLKNLVNVNARYVIAFHCVERDTKLYAESGLEVGNIEKNKTNLTMAVMGVKLENGIIKTEFDKSFAENAANRYLRNARWYKLILDNLKKSERAVVNEFRNTVCHLNAIRNININIKEIKEVENYFALYHYLIQKHLENRFADKKVERDTDFISKLEEHKTYCKDFVKAYCTPFGYNLVRYKNLTIDGLFDKNYPGKDDSDEQK

SEQ ID NO: 1001 - protein, 698 aa, Unknown
  source: /note="Description of Unknown: LbuCas13a sequence"
MKRIGKKLNKINSLKYSFEKRNIIYDYYYKEEDIAKLVLEIENLTKLEKYKREFYHEIYEEIQNVNNMKELIEKVPDMSYVYKRKIKRIFEYQNLKKLIENKLLNKLDTYVRNCGKYNYYLQGVSSVAYFSLRNIENDITGRMRGKTVKNNKENKKNEVKENLKMFYSYFNMNEIEDFANIDEAISSIRHGIVHFNLELEGKDIFAKNEISKKMFQNEINKLKLKIFRQNSANVFRYLEYKILKRTRFEFVNKNIPFVPSFTKLYSRIDDLKNYWKTPNKTKEIIDAQIYLLKNIYYGEFLNYFMSNNGNFFEISKEIIELNKNLKTGFYKLQKFEDIQELANIQSLYMINAGNILKYTERLNMFYLILKLLNHKELTNLKGSLEKYQSANKEEAFSDQLELINLLNLDNNRVTEDFEEADEIGKFLDFNGNKNKELKKFDTNKIYFDIKHRAFYNIKKYGMLNLLEKIADKAGYKISIEELKKYSNKKNEIEKNHKMQENLHKDEKFTDEDYESYENIEEYTHLKNKVEFNELNLLQGLLLRILHRLVGYTSIWERDLRFRLKGENQYIEEIFNFENKKNVKYKGGQIVEKYIKFYEKYSSANIKVLKQKKDLYIRNYIAHFNYIISLLEVLENLRKLLSYDRKLKNAVMKSVVDGADKTLESEKIVHLKTDRNSEELCKLVKIMFEYKMEEKKSEN

SEQ ID NO: 1002 - protein, 698 aa, Unknown
  source: /note="Description of Unknown: LshCas13a sequence"
MSEKLEKIIENETEKNRYYKKSKNKKMLVEKILNINIEKVKEKRRNRKSYVLLDKLEKELKKGNCDTEIFEQKVRLIEIEKILNESILSEKILKRVKQYTLEHIMYLGKLRHNDITFFASTNMELNKINIDFFGGDREKNYVLDKKILNSKRDLDFIDNNITNNIRKFTKIGTNERNRILHAISKRDNKVINIIQNLKISDEEVSKLNLDVVFKDKNIITDIKISEENNNDIKYLPSFSKVLPEILNLYRFDTIETEKIVLNALIYVNKELYKKLILEDDLEENESKNIFLQELKKTLNIDENIYKNAQISASKGNNKAIKKYKQIKDINDNKTYFEYIISIFALLNSNAINKIRNRFFATSVWLNTSEYQNIIDILDEIMQLNTEIEKDFDLEKIVIFDDETILQDEQLKKKVDQYIKDKDQEKKYKNENKFQEIYYPKEYIYKKNLFLNIGNPNFDKIYGLISNDIKMADAKFLFIDGKNIRKNKISEIDAILKNLNFAKNIQNKNYKSFNRVSEYKKIRDLVEFNYLNKIESYLIDINWKLAIQMARFERDMHYIVNGRELGIIKLSGYNTGISRAYPKRNGSDGYTTTAYYKFFECYGFGIDLSENPENESIRNYISHFYIVYSIAEQIDRVSNLLSYSTRYNNSTYASVFEELKKLMKPKKVSVLELESYNSDYIKNLIIELLTKIENTNDTL

SEQ ID NO: 1003 - protein, 745 aa, Unknown
  source: /note="Description of Unknown: HheCas13a sequence"
MVIESTGFGRNLKAEEEVDIVNRKEQLLKSIKNNRSTKKMKFKLIDVPNITNRLDKTDKKARSISRAVSEELRYFPVKSVDKYKNYCSYKVVKKEVNRSIINQLVAGLIQQGKLLYYFYTSLSWGINRLTSFFDDITTKKAKEAIESNYRMQDHFKEKLAFFYPVYVKDRPDDDIENIVLVKNAIESVRNRTFHFKESSLLELLKLDKIDYSVAAEFIKRDIENLYDVFREQRSLGIAEYYKDMISKTCGLEFALYSPKNSLMPAFKNVYKRGANLNKPKETGDQYIEVKNNDQSYNAYKNLLQLIYYHAFLPEVRENEALITDFINRTKEWNRNKKHKITVNTYRYESIPDYQGLKVLQRKQMARAKNKGKSTDNTSAELLCFYLFLRLLDENEICKLQHQFIKYRCSLKERRFPGNRTKLKETELLAELEELMELVRFTMPSIPEISAKAEYDTMIKKYFKEKKVKNPKTSNLYYHSDVTRKYMALLMRSAPLHLYKDIFKGYYLITKKECLEYIKLSNIIKDYQNSLNELHYLDKKDFYKVKEYEQVARYKHLQHKINFESLYRIFRIHVDIAARMVGYTQDWERDMHFLFKALVYNGVLEERRFEAIFNNNDDNNDGRIVKKIQNNLNLCWNKKLNKNEFGAIIWKRNPIAHLNHFSSLESLINSLRILLAYDRKRQNAVTKTINDEGQIDIENEPIIHLKFDKQKEWICNGIKEEVYDKGNLFKFDYEDKNKSSANPKHT

SEQ ID NO: 1004 - protein, 775 aa, Unknown
  source: /note="Description of Unknown: EreCas13a sequence"
MAQQKEDFVAYTLRKSLVVEREIVCKLVKGSQGANIVRSVRNQNAKENEEKEGLNLNYANLDLMEAEAENIKLDAVVEKRERKVLNCKAGKLFKLRKGYLAEKVWKDAINLISIKYIALGKAVYNFAVDIAFSVNNLARAESDFLLWKRNDIADKLKNKDDMASVSAVLQFFGGKSSYKGKKKNYEVRIDDLRKAIYCARNENFHFKTALVNDEKWNTELFGKIFERETEFCLNVEKDRYSNNLYMFYQSELRDHLYSRSVSRAAQVPSYNSVIVRTAFPEYITNVSYDADTLGKWYSACYYLLKEIYYNSFLQSDRALQLFEKSVKTLKQQRAVDNFKDHFSDIKSACCQIYMTEYNQQNNQIKKVRSSIEVSGSQELQKWYIVGKFLNARSLNLMVGSMRSYIQYVTDIKRRAASIGNELVSVHDVEKVEKWVQVIEVCSLLASRTSNQFEDYFNDKDDYARYLKSYVDFSNVDNEEQSDLYVDKVNRNIVHSKLFAADHILRDIVEPVSKDNIEEFYSQKAEIAYCKIKGKEITKAVLKYQKLKNRVELRDIVEYGEIINELLGQLINWSFMRERDLLYFQLGFHYDCLRNDSKKPEGYKNIKVDENSIKDAILYQIKDGDKLKEQCVKGGVGVKVSAFHGLNEKTLYNAGLEIFEVEDIINLRNGIDHFKYYRSMLSIYSEVFDFFTYDIKYQKNVLNLLQNKPGASIKSDTFQYKVTDAKDERYLETIRKILYYAENEEDNLKESDDQNKQKEKNKDNKGKKNEETKLSN

SEQ ID NO: 1005 - protein, 727 aa, Unknown
  source: /note="Description of Unknown: LseCas13a sequence"
MKKSSSNFLNHRFKKSLYYICWESFYISSKTKLIKKSIRNNRIQSTESGQLMDKDILNKNALKATFKEAKKNDKEINYKLKYFPIKKGDIRNLEIGEIQKIVNHRLKNKIVQRILQEGKLASYEINACLFASNNLRNMKKDILMIGEFKNSFKEIKHKKFIRQWSQFFSQITVDDELASWGLRGAIAPIRNEIIHLKKHSWKKFFNPTTSEFLYKETLFKDYFYSELDSVPELIINKESSKILDYYSDQLNTIPNFELSLLTSAVPFAPSFKRVYLKGFDYQNQDEYNEKAFNSEAFQAQYSLFKMVYYQVFLPQFTTNNDLFKSSVDFILTLNKERKGYAKAFQDIRKMNKDMSYIQSQLMLYQKKQEEKEFHTDMDDSNIAFWLMCKLLDAKQLSELRNEMIKFSCSLQSTEEISTFTKAREVIGLALLNGEKGCNDWKELFDDKEAWKKNMSLYVSEELLQSLPYTQEDVINRSIDLVKKYGTETILEKLFSSSDDYKVSAKDIAKLHEYDVTEKIAQQESLHLARDSAWTKKYNDISNYQWAKTKVELTQVRHLHQLTIDLLSRLAGYMSIADRDFQFSSNYILERENSEYRVTSWILLSENKNKNKYNDYELNASIKVSSKNDPQLKVDLQRLTLEYLELFDNRLKEKRNNISHFNYLNSILELFDDARDVLSYDRKLKNAVSKSLKEQTNHKLQPKKIHHLGSNQVSNEYCQLVRTLLTMK

SEQ ID NO: 1006 - protein, 726 aa, Unknown
  source: /note="Description of Unknown: PprCas13a sequence"
MKRQSLPFLNHKFQEPVKYYIQTKSDLLKKSIENNRIDLTERKKALLTEFTASGMLQDVKPLTDDKGKINTNAYHRGLKYFPIKTDIAHYLKAQTLKTTIEKQLVNAIRANIIQQGKTNHHELGTCAFAANNIRNMTNDILGKGDFIKSLLKDNSQLYSFFFGNKAEKETQLWGIRGAVQQIRNNVNHYKKDALKTVFNSNKQQTNYADTIYKARFINELEKIPEAFAQQKTGGAVSYYTENLKTTFQFSLCRSTIPFAPGFKKVFNGGINYQNAKQYLRKENFAEESYNARYFMLKLIYNNLFLPGFTTDRKAFADSVGFVQMQNKPRKKEAYAFEAVRPMTAAMAYVQSELMQEQNKKEEKVQYAKADDAHIAFYVFCKLLDAAHLSNLRNELIKFRESVNEFKFHHLLEIIEICLLSADVVPTDYRDLYSSEADCLARLRPFIEDITNWSDLFVQSDVIHANIELSVKYGTTKLLEQIINKDTQFKTTEANFTAWNTAQKSIEQLIKQREDHHFAQKFIEKHGDDYDYINTYNWLDNKMHFVHLNRLHGLTIELLGRMAGFVALFDRDFQFFDEQQIADEFKLHGFVNLHSIDKKLNEVPTKKINKIIQINGNKINESVRANLIQFISKRNYYNNAFLHVSNKQMYDIRNHIAHFNYLFSLIDLINELRELLHYDRKLKNAVSKAFIDNADHSLEPKKIYHLGTNQVMMAYCNMCRSLLEMKK

SEQ ID NO: 1007 - protein, 570 aa, Unknown
  source: /note="Description of Unknown: LwaCas13a sequence"
MNRYNKKNRKEKNAVQDKNYSEYFFIKEDISEYDDKERVIKGKKIKEYKENSLKYSFEENKANYQKINENNVYKNRKIDLLLKSIYINNVQEAFDKLYKKEDIEKLFFLIENSKINLEYKKYGINPTNDREMTFYKELKKDEQKSIEENDKENAKKLDNFDLENIEKIFNEETEINIIIQNVNNKGKVLNELREYIKEKEENDNKLKEKIPDMSELKQVDKNIKYQIYNLELKKSYKKQKSKSKNGKNDYLYLNIKKIKRIFNCGKYNYYLQNTGQLETKDLEYIKTVGATSDFIARNRQNEAFLRNIGTDITGRVVKSSKSHIFKKTVVDKIYNENKQNEVLKMFYSYDFEIFDANKIFNMDNKILESISYSRNGVGHFNKLILGKYKKKDINTNKRFANIDEAISSIRHGIVHFNLELEGIEEDLNNNEEIKGYFIKKRGEIERKVKEKFLSIAPSKMFQNEINEKLKLKKQLNSNNLEVYEFEILKRKIVIIKYLKNTKFNFVVPSFTKLIKKGELFNNKNNKTLKFWSVPNFLLKELYYNNFYKEFLEKDAQIYLLKNGEFLNKFV

SEQ ID NO: 1008 - protein, 706 aa, Unknown
  source: /note="Description of Unknown: LspCas13a sequence"
MSEKLEKIIENETEKNRYYKKSENKKMFVEKILNTNIEKVKENRRNRKSYVLLDKLEKELKKGNCDTEIFEQKVRLIEIEKILNESILSEKILKRVKQYTLEHIMYLGKLRHNDITFFASTNMELNKIVTDFFGFNLNGQKITLKEKVPSFKKKLNFINNNIDEKSHFYSFQKEGYLLRNKILHNSYGNIQEKNENVEKLIKELKVSDEEISKLSLDVIFEGKDIINSLKIGEYKDKKYLPSFSKIVLEITRKFRFDIESEKIILNAVKYVNKILYEKITSNEENEFLKTLPDKLVKKSNKNKNLLYKNAQVSSSKGDKKAIKKYTKIEERKDNKSIEYIISIFALLNSNTINKIRNRFFATSVWLEKQNGTKEDYENIISILDEVLLINLIVENDEDIRKIFEDENFKFKLECNSENSKKLESFIQNIIDEEKYKNKNKFEKIYYPKEYIYKKNLFLNIGNPNFDKIYGLISKDIKNVDTKILFDDIKKNKISEIDAILKNLNFAKNIQNENYSSFGEFNKVSEYKKIRDLVEFNYLNKIESYLIDINWKLAIQMARFERDMHYIVNGRELGIIKLSGYNTGISRAYPKRNGSDGYTTTAYYKFFECYGFGIDLSENPENESIRNYISHFYIVYSIAEQIDRVSNLLSYSTRYNNSTYASVFEELKKLMKPKKVSVLELESYNSDYIKNLIIELLTKIENTNDTL

SEQ ID NO: 1009 - protein, 701 aa, Unknown
  source: /note="Description of Unknown: Lwa2Cas13a sequence"
MIRRTKKEAKIKAIEKSLKIRSRIYEYYYTEENIKELYSKIEEILKKTHLKREFYQNEQIKDSIKKEENFIEFIENTGNLELKNVYIKRRIENIFEYGKLKKLIVYKLENKLNNYVRNCGKYNYHMEGVSSFGYFSLRNIEEDLTKKERRNLEKAKEDITIKNTFIKENLKMFYGDFDNDELKQFVNMLNAITSIRHRVVHYNMNTNSENIFNSGKLLKSIFEKETDELKLKIFRQNSAGVFDYWERKIDENIEFKFVNKNIPFVPSFTKLYNRIDNLKGYINIPKRKEARDSQIYLLKNIYYGEFVEKFVNNNDNFEKIFREIIEINKNTKTKFYKLEKFETLKALEKLQSLHQINYNRNKINYSDRMSIFYLLLKLIDHKELTNLRGNLEKYVSMNKNKIYSEELNIVNLVSLDNNKVRANFNKPEDIGKFLKTETSINQLNNFSEIFADIKHRSFYNIKKYGILDLLEKIVDKADLKITKEEIKKYENLQNELKRNYKIQERIHFLIKNNEKDFNDYENIQNYTQLKNKIEFNDLNLLQSLLFRILHRLAGYTSLWERDLQFKLKGENKYIDEIFNFDNSKNKIYNEKNERGGSVVSKYGYFLENARDKKKNKIIKKEGLEIRNYIAHFNYIKSILEILEELRNLLKYDRKLKNAVMKSIKDNNSENVDSEKIKHLKTTRNSEDLCELIKMMLEYKKS

SEQ ID NO: 1010 - protein, 793 aa, Unknown
  source: /note="Description of Unknown: LbCas13a sequence"
MINRRDRIIAKYLKKSLCRDIDVQRDFVRAKSQVSRSIKNMNVSKGGEKEAFKSDYASLDPLENKLANGKTDKDAERIRKNTVKLKQVTEFKARTGYLSEKIWKDLINYISIKYIAMGKAVYNYAVYVAFAARHLSSQNSDFLLLKPKGTMDKNDKNKLASNNILNFLKDTILQYFGGHSLLAGGKDDVDLTDLKDVIYSMRNDSFHYATENHNNGKWNKELISAMFEHETERMTVVMKDKYSNNLPMFYKDDLKIDLYKDNVERASQVPSFNKVFVRKNFPALVRDKADKGENELKFYNALYYMFKEIYYNAFLNDKNVRERFITKATKVADNYNKKKKLRIAENDFGQRIKNIVQVNPDCQLIMTEYNQQNNGCMQKKSASRVAGSSELQKWYIVSRFLSPAQANHMLGFLHSYKQYVWDIYRRASETGTEIIAEDKIADITDVDAVIDLSVKLCGTISSEISDYFKDDEVYAEYISSYLDFEYDGNSDAVNDQKVALYYDKLNRNIILSKLYGERRFLEKITDRVSRSDIVEYYKLKKETSQYQTKGIFDSKNIKKFQEMKNIVEFRDLMDYSEIADELQGQLINWIYLRERDLMNFQLGYHYACLNNDSNKQATYVTLDYQGKKNRKINGAILYQIKDSSEWTVSDGKESTGAKIGEFYENTSDCYASGLEIFENDNITELRNYIEHFRYYRSFLGIYSEVFDFFTYDLKYRKNVPTILYNKECAGVYSEQFTYKLVDARDKRYLQSIIRLLFYPEKVNMDEMDNNTGKGYSKRRQQDRKEYDKYKLKN

SEQ ID NO: 1011 - protein, 709 aa, Unknown
  source: /note="Description of Unknown: RcaCas13a sequence"
MLVSEDKFAPGLVVEEEIQTYFVAASVKEVAAAQAFDQVSGRSLSPKVGLCAGKNARAFPADKTELLALMRHTHENRVRNQMVRMGRVSEYRGGAFALAGRSMKAWDRDLTAAVNIRQVISNKAEAMARRGIYFGEPELDREGFVFALLRYLRGCRNQTFHLGARAGFLKIRVVLTDKTVAAIRAIIDNDAKALGARLLADSGAFVAHYASEHFSSEIVKAVKDAPEVSSGLPRLKLLLKRADGVRGLRDTPAPRELDDPATKARYIALLRLYDGPFRAYASAGPAAREAATALAQSVNVTKAYMEGRSSRLRPPNDGLSALTGETATEFRVQIGYESEPIDTRGQYEHWQAALYLVMHFVPASDVSNLLHQLRKWEALQGKYELVQDGDATDQARREALDLVKRFRDVLVLFLKTGEARFEGRAAALFANPATFDRLFMATPTTAEDDPDARTLRGLRQIARYNHMAVLSDLFAKHKVRDEEVARLAEIEDETQEKSQIVAAQELRTDLHHPKTISPEERQSYKTIEEHRFLVGRVYLGDHLRLHRLMMDVIGRLIDYAGAYERDTGTFLINASKQLGAGADWAVTIAGAANDARTQTRKDLAHFNVLPDLTALVNRAREMMAYDRKRKNAVPRSILDMKDHTITQAAIKHLDEARFSQDYLQMVAAVFNGSVQNPKPRRKPATAQSQPDQNKAPSAGSRLPRIRRID

SEQ ID NO: 1012 - protein, 761 aa, Unknown
  source: /note="Description of Unknown: Lb2CAs13a sequence"
MVNNNDDLLEIQLRKGLRKKQEIADFTNQAKNIKLSIENQGAQKGKEKEALSLDYADLDILLADRDVKKSNSKQVKIAERQLRINDKKLYRLRLGYLGEKVWKDILNFLSIKYIAVGKAVFNFAVNVAFAANNLARVKEDILLWNKSDIKKYKKNSKKGILKSILQFFGGASTYHDQPGDYEENLYDIIQIIYSLRNKSFHFKTYDHGDKNWNRELIGKMIEHDAERVISVEREKHSNNLPMFYKADLKDLLYSDYAGRASQVPAFNTVLVRKNFPEFLRKDFNNPEVENQWHSAVYYLYKEIYYNLFLRDKEVKNLFYTSLKNIKQKLASDDFASRCEEIEDCQIIMTEYNAQNFGNRKVKSQEEIKNNLDLQEWYIVGRFLNGRMLNQLAGSLRSYIQYAEDIERRAAENRNKLKPDEKIEACKKAVRVLDLCIKISTRISAEFTDYFDSEDDYADYLEKYLKYQDDANKDDLKFDIYVNILQRNIVMAKLFGPDNILSEVMEKVTESAIREYYDYLKKVSGYRVRGKCSTEDLLKFQRLKNAVEFRDVTEYAEVINELLGQLISWSYLRERDLLYFQLGFHYMCLKNKSFKPAEYVDIRRNNGTIIHNAILYQIKEGKTLKPIETGKGVGSKIGQFIPSYKLEIYNAGLEVFENDNITDLRKYVDHFKYYMSLLDLYSEFFDFFTYDMKYQKNVVNVLENKERASLTSEDFMFKLFPARDERYLQTIAKLLYYPNEIEETINKKVQFNRKKITRKQKN

SEQ ID NO: 1013 - protein, 769 aa, Unknown
  source: /note="Description of Unknown: CamCas13a sequence"
MLNRESKLLLYYLRKGLKPEKELKVFKTFKKNLIRSIENQNITQGREKSAIESMYADLNILTEDRETRKKEKLAVKEALNDLKINPEKLYKLRIGYLGEKVWKDLLNYLSIKYIAVGKAVFHFAVEVAFAANNLFRAEEDFLLWKAEKIAESIKKEGEGNTLKSILQFFGGASSYGNESSGYETKADDLRKAIYSLRNETFHFTTLNKGSFDWNAKLIGDMFSHEAATGIAVERTRYSNNLPMFYRSDLKDHLYNTYHPRASQVPSFNSVFVRKNFRLFLSNTSFDTEVYQKWESGVYYLFKEIYYNSFLPSGDAHHLFFEGLRRIRKEKKRNAVQDFGRRCDELKNCQMIMTEYNEQNNGNRKVKSTERVKQSPDLQRWYVLCKFLNGRLLNQLSGVIRSYIQFAGDIQRRAKANHNRLDNTQRVEYYSNVLEVVDFCIKGTSRFSNVFSDYFRDEDAYADYLDNYLQFKDEKNEEEVKAGIYMDVMQRNIVMAKLFGPDEVLKNVVPKVTREEIEEYYQLEKQIAPYRQNGYCKSKKLLRFQRIKNRVEFQTITEFSEIINELLGQLISWSFLRERDLLYFQLGFHYLCLHNDTEKPAEYKEISREDGTVIRNAILHQVEKGEADCKLSISKDGAGKKIKDFFQNQKYTIYLAGLELFENDNITDVRKYVDHFKYYMSILDLYSEIHDFFTYDMKYQKNVANMLENKARAGMRSEDFTYKLIAARDQKYLNTVARLLYYPHEAKKTNRGDGTFNKKGTARKEKDRNS

SEQ ID NO: 1014 - protein, 727 aa, Unknown
  source: /note="Description of Unknown: CgaCas13a sequence"
MKKASALFIKRKFKNDDIVTDESWADFFIERKIILLANSIEQNKNPERKRVLHIEVQERGRVQDELKNPEKEKEAYKKQKNFKIKYFPIKKDEPYYLNSETIATTVNYQLKNALISYLMQIGKYKQFGLDACVFATSSLKNISGDILGKREFKEAIATSSVNYHHFFPYFELKDRESTEAKQQNIWALRGSVQQIRNEIFHSFDKNQKFNLPQLDSNSYIETDYKFLFEAEKNQLEQFFIERKSSGALEYYPKSLEAKKEMKFSLGSQVVAFAPSYKKLVKKGHSYQTATEYNRYELKEESFQAQYYLLKLIYQYVFLPNFSGNSPAFRETVKAILRINKKKFLRKYAFEQVREMEFKMSYLQSEMREEKVRKAEKNHQLVATNSAISYWLFCKLLDSRHLNELRNEMIKFKQSRIKFNHTQHAELIQNLLPIVELTILSNDYDEKNDSQNVDVSAYFEKSLYETAPYVQTDVSFRPILKLEKYHTKSLIEALLKDNPQFRVAATDIQEWMHKREEIGELVEKRKNLHEKREEYKKIDRFNWKANKVTLTYLSQLHYLITDLLGRMVGFSALFERDLVYFSRSFSELGGETYHISDYKNLSGVLRLIKNIKVIDNEENPGNEPEVKPFLRHAYLENVIGIKAVHGKIRNQTAHLSVLLSMIESMNNLRDLMAYDRKLKNAVTKSMIKENHKSLIPKEIIHLKTNQVSEEYCQLVLALLTTNPGNQLN

SEQ ID NO: 1015 - protein, 711 aa, Unknown
  source: /note="Description of Unknown: Cga2Cas13a sequence"
MKEQSKRFFKSKYHEEIKYDEKNWSYFYLNRKKEILANSIQQNRAEEPNRKQLFQMKFQESPAITEKLDKDKSNKTRNFEIKYFPKTAESYYLNPQTIIKTVGYQLRNAFVQYLLQVGKLHQYDACVFASSSLRNINEDILTREKFKKELEKNVLKHDLFFKTNPAKKELDLWAIRGAVQRVRNQIFHQQINKRHEPNQLKGSSYQKTIYQKLFDAEIKDIEIYFAEKKSSGALEQYSKDLESNKELTLSLGGQVVAFAPSYKKLYKQGYFYQNEKTFTDYDFSNDVFKANYYLIKLIYHYVFLPQFSANNKLFKDTVHYVIQQNKNKKIRKYAFEQVKLMKNMQYLQREMQEERTIKEAKKEQIKTGDEEIAFWIFAKLLDARHLSELRNEMIKFKQSSVKKGLIKNGDLIEQMQPILELCILSNDSESMEKESFDKIEVFLEVELAKNEPYMQEDVKFRFMKQLEKYQTRNFIENLVIENPEFKVSEKIVLNWHEEKEKIADLVDKRTKLHLDKPAEFAKFAEYEAIENFNRLDHKVRLTYLKNLHYLMIDLMGRMVGFSVLFERDFVYMGRSYSALKKQSIYLNDYDTFANIRDWEVTSSSDLTFQETAENLKKPMENQLKALLGVTNHSFEIRNNIAHLHVLVSLLSCMNDLRKLMSYDRKLKNAVTKAIIKDHTKSLKPKKIIHLEMDQVSQEYCDLVKKMLVFTN

SEQ ID NO: 1016 - protein, 678 aa, Unknown
  source: /note="Description of Unknown: LneCas13a sequence"
MKKESTKLFKPKFQNMISYPDWGIFYIHYKQTTIQKSIEQNKIQSPDRKLVLQTAFLNGESFKLVDEDKSANYKIKYFPIKRARADFLKKELIESTVEQQFKNAVYHYVLEQGKMEAYELNACAFASNNLKMIEKDILGKGNFKKNLPNSTTRSDVVKKMIPFFSDLQNVNDEAIWAIRGSIQQIRNEVYHCKKHSWKSILKKGKYADSDMQKLMDKDIAKIPEFIEEKKSSGVVRFYRDELQEMKQGFSLLTTNAPFVPSFKRVYAKGHDYQTSKNFDILEYGEEDFRARYFLTKLVYYQQFMPWFTADNNAFRDAANFVLRLNKNRQQDAKAFINIREVEEGMGYVQGQIAIHEDSSFLKNKDDYIAFWIFCKMLDARHLSELRNEMIKYDGHLTGEQEIIGLALLGVDSRENDWKQFFSSEREYEKIMKGYVVEELYQREPYRQSDILFRGVEQARKYGTETVIQRLFDANPEFKVSKCNLAEWERQKETIEETIKRRKELHKPQNNAFFKEYDAIDAYNWHKNKTTLAYVNELHHLLIEILGRYVGYVAIADRDFQCMANQYFKHSGITERVEYWGDNRLKSIKKLDTFLKEGLFVSEKNARNHIAHLNYLCTLLYLSERLREIFKYDRKLKNAVSKSLIDENKHSLEPKKLRHLGTNQVSEEYCGIVKRLLEM

SEQ ID NO: 1017 - protein, 769 aa, Unknown
  source: /note="Description of Unknown: Lb3Cas13a sequence"
MGAKFEEALTETLKKSFRKEELIQEYFTKLQKNVVKSIKNQNAVSSDEKDVLKTDYAVLDEICHITKIGKNGKEQKVLDYEENRIENGEEFKFETGYISEKVWKAVINHLSIKYIALGKAVYNYAMNVVFATNYLACADKDFLLFSKEDIRSCTKKDGNLCKNIMQFWGGYSTLKDDKDALELYSLKSMLYSMRNSSFHFSTENVDNGSWDTELIGKLFEEDCNRAARIEKEKYNNNLHMFYSSLLEERLYSSHHERASQVPSFNRVFVRKNFPSSLSEQFTDSKDEQIWQSAVYYLCKEIYYNDFLQSKEAYKLFREGVKNLNNQKAADSFKQAVVYYGKAIGNCQAIMTEYNRQNNDGLKKKSADKVKKTPELQKWYTLGRLINPRQANQFLGSIRNYVQFVKDIQRRAKENGNPINYYEVLESDSIIKILEMCTKLNGTTSNDIHDYFRDEDEYAEYISQFVNFGDNSESEGKKNGIYYDIVNRNWVLCKLYGSPDLISKIISRVNENMIHDFHKQEDLIREYQIKGICSNQDLRTFQVLKNRVELRDIVEYSEIINELYGQLIKWCYLRERDLMYFQLGFHYLCLNNASSKEADYIKINVDDRNISGAILYQILKSGKKASDENSNEQTSKKINYFLGDKKDQLYLAGLELFENENIIIFRNEIDHFHYFRSMLDLYSEVFDFFTYDMKLRKNVVNMLYNKPSAGVSSDVFTYKVLPAKNEEFLLNVARLIYYPDMEAVSENKSNDKKGKISRSNTRSSNQSKYD

SEQ ID NO: 1018 - protein, 631 aa, Unknown
  source: /note="Description of Unknown: Lsp2Cas13a sequence"
MKELIEKVPNVSYVYKKKVKRIFEYQSLKKLIENKLLNKLDTYIRNCGKYSFYLQGVSSAAYFSLRNIENDITGKMRGKTVKNKKNNKQNEVKKNLKMFYSYFNMKEIEDFSNIDEAISSIRHGIVHFNLELEGKDIFTKNQISKKMFHDEINKLKLKIFKQNSANVFRYLEYKILNRTRFEFVNKNIPFVPSFTKLYSRIDDLKNYWKIPNKTKEITDAQIYLLKNIYYSEFLNYFMSNNGNFFEIIKEIIELNKNLKTGFYKLQKFENLQELANIQSFYMIDAGNILKYTERLNMFYLILKLLNHKELTNLKGSLEKYQSANKEEAFSDQLELINLLNLDNNRVTEDFEEADEIGKFLDFNGNKNKELKKFDTNKIYFDIKHRAFYNIKKYGMLNLLEKISDEAKYKISIEELKNYSNKKNEIEKNHTNQENLHKDEKFNDEDYKKYRNIQQYTHLKNKVEFNELNLLQSLLLRILHRLVGYTSIWERDLRFRLKGENQYIEEIFNFNNSKNVKYKNGQIVEKYISFYEIYSDKKVKELKKKKDLYIRNYIAHFNYIISLLEVLENLRKLLSYDRKLKNAIMKSIVDEKDKSLKSEEVVHLKTYRNSKELCELVKVMFEYKMKEKKSEN

SEQ ID NO: 1019 - protein, 636 aa, Unknown
  source: /note="Description of Unknown: FpeCas13c sequence"
MAREKKRYLAYRSNMLLVGEIWRIILVENFKKRMSQEFINYKIEKNTKEKKEINRLKELSDEEIREDIEKILKIYSDLRVRQLKLNKTNYLEKEDKITVLGVSDSAIKYYSYYNLSLEKEIEIMNEKIKEINKNELKEQKELGTAYVHNERNKNALDKNKKLVELKIKMDKIRNSILRLKYKLQVAYGFLMEEYKGNIKKFKDEDISKEKIKSKGEKYLEVKSEKKYITKILNSIEDIHNNQEENNLFKFYVLTYILLPFEFRGDFLGFVKKHYYDIKNVEFLDENNDEKMKNSFFNKIRLFEKNLKEGGEENRGIFFKYYQIVLKLYNDVELAMLLTLSESDEKDINKIKELVTLKEKVSPKKIDYEKKYKFSLASEEVKNLAYLRNKICHLNYSKFIDDLLTIDTNKTTDLLINDRIRKLIKFIRENNQKNISIDYNYINDYYMKKEKFIFGRKQAKTIIDSGKKANKRELLKMYRVKKENINLIYELSKKLNELLDKKLLKDIDFTDVKIKNKSFFELKNDVKEVANIKQALQKHSSELIGIYKKEVIMAIKRSIVSKLSIIIYDKLEIRRERDINKFQFLLGYEKIIETKEKKKVVVKIQNNSELAKTPEEISKLGILDLTNHYCFNLKITL

SEQ ID NO: 1020 - protein, 669 aa, Unknown
  source: /note="Description of Unknown: FvaCas13c sequence"
MAREKKRFLSYRSNMLLINEIWEMELVAQIKEYFTKEIENYNIDKKEKNKKLEELNKLEILTDEEIKADVIKIIKIFSDLRLRQMKINKTNYLEGDEKFNILGKDVRAKNALGHYDENFIKAQKELEEDSEDLEKKLEKKQKKLKELKKELKQHYKRLNCAYVYNERKNNAITGNAQLLRIKKEMEEISNSLFRLKYKMQIAYAFLEMEYEGNIAKFKNEDCSKTEKIQEKSEEYLNYCMEKEEDGKNYKFHFKEISEIKDTHNNTSENNLFKFYILTYLLLPMEFKGDFLGVVKKHYYDIKNVDFTDESEKDKMIGSFFHKIRLFEKNIKYKGIDEIGIFFKYYQIIFRLYNDLEIHGLFNVSFDINKILSDLKSYGNENINFREFLYVIKQNNNSSTEEEINKKTEGISFLRNKISHLEYEKIIEGVLKTAVNGNKKTSEVFLNEKIKKIINFIKENELDKIELGFNFINDFFMKKEQFMFGIKQVKEGNSDSITTERKRKERLKITYGLNYNNLSKIYEFSNTLRELKDSTLLKKVDLSKVMLKEKPICSLQYENNTKLEDDIKRILLKDSSDIMGIYKAEVVKKLKEKLVLIFYVTVYDTKEILVKRNNSKEEYFYTTQYYTLEITKENELKVIPAKKLEGKEFKKEENKLMLNNHYCFNVKIIY

SEQ ID NO: 1021 - protein, 650 aa, Unknown
  source: /note="Description of Unknown: FulCas13c sequence"
MAREKKRFLSYRSNMLLINEIWKMELVAQIKEYFTKEIENYNIDKKEKNKKLEELNKLKILTDEEIKADVIKIIKIFSDLRLRQMKINKTNYLEGREEFNIIGKNIKAKEVLGHYNEHFVNAKKRLERNKKSKKLEKELEQHYQRLNCAYVYNKRKSEVITANVELLRIKKEMEEISNSLFRLKYKMQIAYAFLEIEFGGNIAKFKDEDCSKMEEVQKKGVKYLKYYKDKEAQKNYEFPFEEIFENKDTHNNTSENNLFKFYILTYLLLPMEFKGDFLGVVKKHYYDIKNVDFTDESEKDKMIGSFFHKIRLFEKNIKYKGTDEIGIFFKYYQIIFRLYNDLEIHGLFNISSDLDKILRDLKSYGNKNINFREFLYVIKQNNNSSTEEEIKTKTKEISNLRNGICHLNYKEIIEEILKTEISENKEATLNEKIRKVINFIKENELDKVELGFNFINDFFMKKEQFMFGIKQVKEGNSDSITTERERKEKLKETYELNCDNLSEFYETSNNLRELEDSAFLKKIGLYKVKNNKVNSKVKDEEKRIENIKRKLLKDSSDIMGMYKAEVVKKLKEKLILIFYVTVYDTKEILVKRNNSKEEYFYVTEYYTLEITETNELKVIPAKKLEGKEFKNKENKLMLNNHYCFNVKIIY

SEQ ID NO: 1022 - protein, 635 aa, Unknown
  source: /note="Description of Unknown: FneCas13c sequence"
MAREKKRFLTYRSNMLLTEEIWHLKKNKLIQSTENYNIEEKESKKGAFTIIKKLQELSEKSLTEDCEKIIKLYSELRVRKMKLNKVNYLEDNDTLFVLQKTKKAKTLYQIYDEKFQSEMEFLESEKKNEKLKKKFKAHFHNINSAYFYNERKNEEITQNRKLLKLKQEMEEIKNSLFRLEYKMKIAFGFLFCEFDGNISKFKDEDASNQEKIIKNGEKYLTYFLKEEKEKFNLEKMQKIIQKTEEPETKNNLFKFYLLTYLLLPYELKGDFLGFVKKHYYDIKNVDFMDENQNVEKQEYFYHKIRLFEKNVKYNKKVSLKNNGMFFKYYQIAFKLFNDIELYSLFFLREKSEKPFEVFLEELKDKMIGKQLNFGQLLYVVILSKKIDPEIAYLRNFLSHLNYSKFLDNFMKINTNKDLIPSIKIQKMIQFIEKCNLQQIDFDFNFVNDFYMRKEKMFFILKQIFPDINSTEKQKKSILRKRYHLINKKNEQIKDEHEAQSQLYESCDKNNFYRRLKEEKLLFLEKQGKKKLSMEENKDKIAGDISDLLGILKKEITRDIKDKLTEKFNISFYNHRVFLIRDKNSDKFESIIFISKNGKEITIQCCDKVLETLMIEKNTLIISLIPHYSYSIDVKY

SEQ ID NO: 1023 - protein, 500 aa, Unknown
  source: /note="Description of Unknown: CspCas13c sequence"
MEREKKRFLNYRSNFLIINEVWLIQITDYIFDKLSKDIENKKIKKYKKNKTFYTKITNLEYNSKESLKEDLIKIISIFTNLRSDEFKTNRTNYLDGTESFTIVKKHQNLKKLYTYYNLHFEKEMEEYSKKEKLKEKIDLLQSELREHKNLLKQIYFYSERKNTAINHNTKLLSLKNKMDKIQNSLYRLKYKLKIAYSFLMIEFDGDVSKFKNNDPTNLEKRVDKKEEYLNYTAPKNKFNFAKLEEELQKIQSTSEMVSPENNLFKFYILTYIMLPVEFKGDFLGFVKNHYYNIKNVDFMDESLENNEKIESSFFNKIRLFEKNVKYKSTDEIGIFFKYYQNVFKLCNDIEIHALLALANKKQQNLEYAIYCCSKKNSLNYNELLKTFNRKTYQNLSFIRNKIAHLNYKELFSDLFNLDLNTKVRCLIEFSQNNKFDQIDLGMNFINDYYMKKTRFIFNRRLRDLNKEKIIDGKRKQQNELLKKYGLSRTNIKDIFNKAWY

SEQ ID NO: 1024 - protein, 6 aa, Artificial Sequence
  source: /note="Description of Artificial Sequence: Synthetic peptide"
  VARIANT (2)..(2): /replace="His" or "Lys" or "Gln" or "Arg"
  MOD_RES (3)..(5): Any amino acid
  SITE (1)..(6): /note="Variant residues given in the sequence have no preference with respect to those in the annotations for variant positions"
RNXXXH

SEQ ID NO: 1025 - protein, 6 aa, Artificial Sequence
  source: /note="Description of Artificial Sequence: Synthetic peptide"
  VARIANT (2)..(2): /replace="His" or "Lys" or "Gln" or "Arg"
  VARIANT (3)..(3): /replace="Ser" or "Asp" or "Glu" or "Gln" or "Asn" or "Gly" or "Tyr"
  VARIANT (4)..(4): /replace="Ser" or "Thr" or "Val" or "Leu"
  VARIANT (5)..(5): /replace="Phe" or "Asn" or "Tyr" or "Val" or "Ile" or "Ser" or "Asp" or "Glu" or "Ala"
  SITE (1)..(6): /note="Variant residues given in the sequence have no preference with respect to those in the annotations for variant positions"
RNRILH

SEQ ID NO: 1026 - protein, 6 aa, Artificial Sequence
  source: /note="Description of Artificial Sequence: Synthetic peptide"
  VARIANT (2)..(2): /replace="Ala" or "Arg"
  VARIANT (3)..(3): /replace="Lys" or "Ser" or "Phe"
  VARIANT (4)..(4): /replace="Leu" or "Phe"
  VARIANT (5)..(5): /replace="His" or "Leu"
  SITE (1)..(6): /note="Variant residues given in the sequence have no preference with respect to those in the annotations for variant positions"
RNAAFH

SEQ ID NO: 1027 - protein, 17 aa, Artificial Sequence
  source: /note="Description of Artificial Sequence: Synthetic peptide"
AAIELAAEEAAFAFNQA

SEQ ID NO: 1028 - protein, 17 aa, Artificial Sequence
  source: /note="Description of Artificial Sequence: Synthetic peptide"
NGAEAKKEEAAFYFAAA

SEQ ID NO: 1029 - protein, 17 aa, Artificial Sequence
  source: /note="Description of Artificial Sequence: Synthetic peptide"
NGIALKKAEAAAYANQA

SEQ ID NO: 1030 - protein, 17 aa, Artificial Sequence
  source: /note="Description of Artificial Sequence: Synthetic peptide"
NGIELKKEAVVFYFNQV

SEQ ID NO: 1031 - protein, 17 aa, Artificial Sequence
  source: /note="Description of Artificial Sequence: Synthetic peptide"
ELALAAIEANIFAAERR

SEQ ID NO: 1032 - protein, 17 aa, Artificial Sequence
  source: /note="Description of Artificial Sequence: Synthetic peptide"
EANAKAAEDAIFDKERR

SEQ ID NO: 1033 - protein, 17 aa, Artificial Sequence
  source: /note="Description of Artificial Sequence: Synthetic peptide"
ALNLKAIADNAADKERR

SEQ ID NO: 1034 - protein, 17 aa, Artificial Sequence
  source: /note="Description of Artificial Sequence: Synthetic peptide"
ELNLKVIEDNIFDKAAA

SEQ ID NO: 1035 - protein, 17 aa, Artificial Sequence
  source: /note="Description of Artificial Sequence: Synthetic peptide"
AALLAAPQILAAMENFI

SEQ ID NO: 1036 - protein, 17 aa, Artificial Sequence
  source: /note="Description of Artificial Sequence: Synthetic peptide"
KTAANNPAILAKMEAFI

SEQ ID NO: 1037 - protein, 17 aa, Artificial Sequence
  source: /note="Description of Artificial Sequence: Synthetic peptide"
KTLLNNPQAAAKAENFA

SEQ ID NO: 1038 - protein, 17 aa, Artificial Sequence
  source: /note="Description of Artificial Sequence: Synthetic peptide"
KTLLNNAQILVKMANAI

SEQ ID NO: 1039 - protein, 17 aa, Artificial Sequence
  source: /note="Description of Artificial Sequence: Synthetic peptide"
FNFRAVAANAAAEIDCL

SEQ ID NO: 1040 - protein, 17 aa, Artificial Sequence
  source: /note="Description of Artificial Sequence: Synthetic peptide"
FAFRDATKAAKGEIACL

SEQ ID NO: 1041 - protein, 17 aa, Artificial Sequence
  source: /note="Description of Artificial Sequence: Synthetic peptide"
ANFRDVTKNAKGEADAA

SEQ ID NO: 1042 - protein, 17 aa, Artificial Sequence
  source: /note="Description of Artificial Sequence: Synthetic peptide"
FNAADVTKNVKGAIDCL

SEQ ID NO: 1043 - protein, 17 aa, Artificial Sequence
  source: /note="Description of Artificial Sequence: Synthetic peptide"
ALALRELRNFYSHAAHA

SEQ ID NO: 1044 - protein, 17 aa, Artificial Sequence
  source: /note="Description of Artificial Sequence: Synthetic peptide"
LAKAREARNFYSHYVAK

SEQ ID NO: 1045 - protein, 17 aa, Artificial Sequence
  source: /note="Description of Artificial Sequence: Synthetic peptide"
LLKLAALRNFYSHYVHK

SEQ ID NO: 1046 - protein, 17 aa, Artificial Sequence
  source: /note="Description of Artificial Sequence: Synthetic peptide"
RDVRELAAAEAPILEAY

SEQ ID NO: 1047 - protein, 17 aa, Artificial Sequence
  source: /note="Description of Artificial Sequence: Synthetic peptide"
RAAREASKGEKPILEKA

SEQ ID NO: 1048 - protein, 17 aa, Artificial Sequence
  source: /note="Description of Artificial Sequence: Synthetic peptide"
RDVRALSKGAKPAAEKY

SEQ ID NO: 1049 - protein, 17 aa, Artificial Sequence
  source: /note="Description of Artificial Sequence: Synthetic peptide"
ADVAELSKGEKAILAKY

SEQ ID NO: 1050 - protein, 17 aa, Artificial Sequence
  source: /note="Description of Artificial Sequence: Synthetic peptide"
YQFAIEAAAAENVALEI

SEQ ID NO: 1051 - protein, 17 aa, Artificial Sequence
  source: /note="Description of Artificial Sequence: Synthetic peptide"
AAFAIESTGSEAAKLEI

SEQ ID NO: 1052 - protein, 17 aa, Artificial Sequence
  source: /note="Description of Artificial Sequence: Synthetic peptide"
YQAAAESTGSENVKAEA

SEQ ID NO: 1053 - protein, 17 aa, Artificial Sequence
  source: /note="Description of Artificial Sequence: Synthetic peptide"
YQFVIASTGSANVKLAI

SEQ ID NO: 1054 - protein, 17 aa, Artificial Sequence
  source: /note="Description of Artificial Sequence: Synthetic peptide"
IEAAAWLAAAAALFFLC

SEQ ID NO: 1055 - protein, 17 aa, Artificial Sequence
  source: /note="Description of Artificial Sequence: Synthetic peptide"
IENDAWAADAGVAFFAA

SEQ ID NO: 1056 - protein, 17 aa, Artificial Sequence
  source: /note="Description of Artificial Sequence: Synthetic peptide"
AANDAWLADAGVLAALC

SEQ ID NO: 1057 - protein, 17 aa, Artificial Sequence
  source: /note="Description of Artificial Sequence: Synthetic peptide"
IENDVALVDVGVLFFLC

SEQ ID NO: 1058 - protein, 17 aa, Artificial Sequence
  source: /note="Description of Artificial Sequence: Synthetic peptide"
IFLAAAQANALIAGISG

SEQ ID NO: 1059 - protein, 17 aa, Artificial Sequence
  source: /note="Description of Artificial Sequence: Synthetic peptide"
IFLKKSQAAKLISAIAA

SEQ ID NO: 1060 - protein, 17 aa, Artificial Sequence
  source: /note="Description of Artificial Sequence: Synthetic peptide"
AFAKKSAANKAISGISG

SEQ ID NO: 1061 - protein, 17 aa, Artificial Sequence
  source: /note="Description of Artificial Sequence: Synthetic peptide"
IALKKSQVNKLASGASG

SEQ ID NO: 1062 - protein, 17 aa, Artificial Sequence
  source: /note="Description of Artificial Sequence: Synthetic peptide"
FARNADAAQPRRNLFAY

SEQ ID NO: 1063 - protein, 17 aa, Artificial Sequence
  source: /note="Description of Artificial Sequence: Synthetic peptide"
FKRADATGQPRRALFTA

SEQ ID NO: 1064 - protein, 17 aa, Artificial Sequence
  source: /note="Description of Artificial Sequence: Synthetic peptide"
AKRNDDTGAPRRNAATY

SEQ ID NO: 1065 - protein, 17 aa, Artificial Sequence
  source: /note="Description of Artificial Sequence: Synthetic peptide"
FKANDDTGQAAANLFTY

SEQ ID NO: 1066 - protein, 17 aa, Artificial Sequence
  source: /note="Description of Artificial Sequence: Synthetic peptide"
FAIREAAAVVPEMQAHF

SEQ ID NO: 1067 - protein, 17 aa, Artificial Sequence
  source: /note="Description of Artificial Sequence: Synthetic peptide"
FSIREGYKAAPEMAKAF

SEQ ID NO: 1068 - protein, 17 aa, Artificial Sequence
  source: /note="Description of Artificial Sequence: Synthetic peptide"
ASAREGYKVVPEAQKHA

SEQ ID NO: 1069 - protein, 17 aa, Artificial Sequence
  source: /note="Description of Artificial Sequence: Synthetic peptide"
FSIAAGYKVVAAMQKHF

SEQ ID NO: 1070 - protein, 17 aa, Artificial Sequence
  source: /note="Description of Artificial Sequence: Synthetic peptide"
LLFALVNHLANQAAAIE

SEQ ID NO: 1071 - protein, 17 aa, Artificial Sequence
  source: /note="Description of Artificial Sequence: Synthetic peptide"
LLFSLAAHLSAADDYIE

SEQ ID NO: 1072 - protein, 17 aa, Artificial Sequence
  source: /note="Description of Artificial Sequence: Synthetic peptide"
AAFSAVNHASNQDDYIE

SEQ ID NO: 1073 - protein, 17 aa, Artificial Sequence
  source: /note="Description of Artificial Sequence: Synthetic peptide"
LLASLVNALSNQDDYAA

SEQ ID NO: 1074 - protein, 17 aa, Artificial Sequence
  source: /note="Description of Artificial Sequence: Synthetic peptide"
AAHQPAAIAEALFFHRI

SEQ ID NO: 1075 - protein, 17 aa, Artificial Sequence
  source: /note="Description of Artificial Sequence: Synthetic peptide"
KAAAPYDIGEGAFFARI

SEQ ID NO: 1076 - protein, 17 aa, Artificial Sequence
  source: /note="Description of Artificial Sequence: Synthetic peptide"
KAHQPYDAGEGLAAHRA

SEQ ID NO: 1077 - protein, 17 aa, Artificial Sequence
  source: /note="Description of Artificial Sequence: Synthetic peptide"
KVHQAYDIGAGLFFHAI

SEQ ID NO: 1078 - protein, 17 aa, Artificial Sequence
  source: /note="Description of Artificial Sequence: Synthetic peptide"
AAAFLNIAAILRNMAFY

SEQ ID NO: 1079 - protein, 17 aa, Artificial Sequence
  source: /note="Description of Artificial Sequence: Synthetic peptide"
ASTFAAISGILRAMKFA

SEQ ID NO: 1080 - protein, 17 aa, Artificial Sequence
  source: /note="Description of Artificial Sequence: Synthetic peptide"
ASTFLNASGAARNAKFY

SEQ ID NO: 1081 - protein, 17 aa, Artificial Sequence
  source: /note="Description of Artificial Sequence: Synthetic peptide"
VSTALNISGILANMKAY

SEQ ID NO: 1082 - protein, 17 aa, Artificial Sequence
  source: /note="Description of Artificial Sequence: Synthetic peptide"
AYQAARLVEQRAELARE

SEQ ID NO: 1083 - protein, 17 aa, Artificial Sequence
  source: /note="Description of Artificial Sequence: Synthetic peptide"
TAASKRLAEARGELKRE

SEQ ID NO: 1084 - protein, 17 aa, Artificial Sequence
  source: /note="Description of Artificial Sequence: Synthetic peptide"
TYQSKRAVAQRGAAKRE

SEQ ID NO: 1085 - protein, 17 aa, Artificial Sequence
  source: /note="Description of Artificial Sequence: Synthetic peptide"
TYQSKALVEQAGELKAA

SEQ ID NO: 1086 - protein, 17 aa, Artificial Sequence
  source: /note="Description of Artificial Sequence: Synthetic peptide"
AAIFAWEEPFQANAAFE

SEQ ID NO: 1087 - protein, 17 aa, Artificial Sequence
  source: /note="Description of Artificial Sequence: Synthetic peptide"
KDAAAWEEPFAGASYFE

SEQ ID NO: 1088 - protein, 17 aa, Artificial Sequence
  source: /note="Description of Artificial Sequence: Synthetic peptide"
KDIFAWAAPAQGNSYAE

SEQ ID NO: 1089 - protein, 17 aa, Artificial Sequence
  source: /note="Description of Artificial Sequence: Synthetic peptide"
KDIFVAEEAFQGNSYFA

SEQ ID NO: 1090 - protein, 17 aa, Artificial Sequence
  source: /note="Description of Artificial Sequence: Synthetic peptide"
INAHAAVIAEDELAELC

SEQ ID NO: 1091 - protein, 17 aa, Artificial Sequence
  source: /note="Description of Artificial Sequence: Synthetic peptide"
IAGHKGAIGEAEAKELC

SEQ ID NO: 1092 - protein, 17 aa, Artificial Sequence
  source: /note="Description of Artificial Sequence: Synthetic peptide"
ANGAKGVIGEDELKEAA

SEQ ID NO: 1093 - protein, 17 aa, Artificial Sequence
  source: /note="Description of Artificial Sequence: Synthetic peptide"
INGHKGVAGADALKALC

SEQ ID NO: 1094 - protein, 17 aa, Artificial Sequence
  source: /note="Description of Artificial Sequence: Synthetic peptide"
AAFLIANQAANAVEARI

SEQ ID NO: 1095 - protein, 17 aa, Artificial Sequence
  source: /note="Description of Artificial Sequence: Synthetic peptide"
YAFLIGAADAAKAEGRI

SEQ ID NO: 1096 - protein, 17 aa, Artificial Sequence
  source: /note="Description of Artificial Sequence: Synthetic peptide"
YAAAAGNQDANKVEGRA

SEQ ID NO: 1097 - protein, 17 aa, Artificial Sequence
  source: /note="Description of Artificial Sequence: Synthetic peptide"
YVFLIGNQDVNKVAGAI

SEQ ID NO: 1098 - protein, 17 aa, Artificial Sequence
  source: /note="Description of Artificial Sequence: Synthetic peptide"
AQFLEAFRAANAVQQVA

SEQ ID NO: 1099 - protein, 17 aa, Artificial Sequence
  source: /note="Description of Artificial Sequence: Synthetic peptide"
TAFLEKFRNAASAQQAK

SEQ ID NO: 1100 - protein, 17 aa, Artificial Sequence
  source: /note="Description of Artificial Sequence: Synthetic peptide"
TQAAEKFRNANSVAAVK

SEQ ID NO: 1101 - protein, 17 aa, Artificial Sequence
  source: /note="Description of Artificial Sequence: Synthetic peptide"
TQFLAKAANVNSVQQVK

SEQ ID NO: 1102 - protein, 17 aa, Artificial Sequence
  source: /note="Description of Artificial Sequence: Synthetic peptide"
AAEMLAPEAFPANAFAE

SEQ ID NO: 1103 - protein, 17 aa, Artificial Sequence
  source: /note="Description of Artificial Sequence: Synthetic peptide"
DDEAAKPEYAPAAYFAE

SEQ ID NO: 1104 - protein, 17 aa, Artificial Sequence
  source: /note="Description of Artificial Sequence: Synthetic peptide"
DDAMLKPAYFPANYAAA

SEQ ID NO: 1105 - protein, 17 aa, Artificial Sequence
  source: /note="Description of Artificial Sequence: Synthetic peptide"
DDEMLKAEYFAVNYFVE

SEQ ID NO: 1106 - protein, 17 aa, Artificial Sequence
  source: /note="Description of Artificial Sequence: Synthetic peptide"
AAVARIADRVLNRLNAA

SEQ ID NO: 1107 - protein, 17 aa, Artificial Sequence
  source: /note="Description of Artificial Sequence: Synthetic peptide"
SGAGRIKARVLARLAKA

SEQ ID NO: 1108 - protein, 17 aa, Artificial Sequence
  source: /note="Description of Artificial Sequence: Synthetic peptide"
SGVGRAKDRAANRANKA

SEQ ID NO: 1109 - protein, 17 aa, Artificial Sequence
  source: /note="Description of Artificial Sequence: Synthetic peptide"
SGVGAIKDAVLNALNKV

SEQ ID NO: 1110 - protein, 17 aa, Artificial Sequence
  source: /note="Description of Artificial Sequence: Synthetic peptide"
IASNAAAAGEIIAYDAM

SEQ ID NO: 1111 - protein, 17 aa, Artificial Sequence
  source: /note="Description of Artificial Sequence: Synthetic peptide"
IKANKAKKAEIIAAAKM

SEQ ID NO: 1112 - protein, 17 aa, Artificial Sequence
  source: /note="Description of Artificial Sequence: Synthetic peptide"
AKSAKAKKGEAIAYDKA

SEQ ID NO: 1113 - protein, 17 aa, Artificial Sequence
  source: /note="Description of Artificial Sequence: Synthetic peptide"
IKSNKVKKGAIAVYDKM

SEQ ID NO: 1114 - protein, 17 aa, Artificial Sequence
  source: /note="Description of Artificial Sequence: Synthetic peptide"
REVMAFIAAALPVAEAL

SEQ ID NO: 1115 - protein, 17 aa, Artificial Sequence
  source: /note="Description of Artificial Sequence: Synthetic peptide"
REAMAFINNSAPADEKA

SEQ ID NO: 1116 - protein, 17 aa, Artificial Sequence
  source: /note="Description of Artificial Sequence: Synthetic peptide"
RAVAAAANNSLPVDEKL

SEQ ID NO: 1117 - protein, 17 aa, Artificial Sequence
  source: /note="Description of Artificial Sequence: Synthetic peptide"
AEVMVFINNSLAVDAKL

SEQ ID NO: 1118 - protein, 17 aa, Artificial Sequence
  source: /note="Description of Artificial Sequence: Synthetic peptide"
APAAYARYLAMVRFWDR

SEQ ID NO: 1119 - protein, 17 aa, Artificial Sequence
  source: /note="Description of Artificial Sequence: Synthetic peptide"
KPKDAKRALGMARFWAR

SEQ ID NO: 1120 - protein, 17 aa, Artificial Sequence
  source: /note="Description of Artificial Sequence: Synthetic peptide"
KAKDYKRYAGAVRAWDR

SEQ ID NO: 1121 - protein, 17 aa, Artificial Sequence
  source: /note="Description of Artificial Sequence: Synthetic peptide"
KPKDYKAYLGMVAFADA

SEQ ID NO: 1122 - protein, 17 aa, Artificial Sequence
  source: /note="Description of Artificial Sequence: Synthetic peptide"
EADNIAREFETAEWAAY

SEQ ID NO: 1123 - protein, 17 aa, Artificial Sequence
  source: /note="Description of Artificial Sequence: Synthetic peptide"
EKAAIKREFEAKEWSKA

SEQ ID NO: 1124 - protein, 17 aa, Artificial Sequence
  source: /note="Description of Artificial Sequence: Synthetic peptide"
AKDNAKRAAETKEWSKY

SEQ ID NO: 1125 - protein, 17 aa, Artificial Sequence
  source: /note="Description of Artificial Sequence: Synthetic peptide"
EKDNIKAEFATKAASKY

SEQ ID NO: 1126 - protein, 17 aa, Artificial Sequence
  source: /note="Description of Artificial Sequence: Synthetic peptide"
LPANFWAAANLERVAAL

SEQ ID NO: 1127 - protein, 17 aa, Artificial Sequence
  source: /note="Description of Artificial Sequence: Synthetic peptide"
APSAFWTAKALERAYGL

SEQ ID NO: 1128 - protein, 17 aa, Artificial Sequence
  source: /note="Description of Artificial Sequence: Synthetic peptide"
LPSNAWTAKNAARVYGA

SEQ ID NO: 1129 - protein, 17 aa, Artificial Sequence
  source: /note="Description of Artificial Sequence: Synthetic peptide"
LASNFATVKNLEAVYGL

SEQ ID NO: 1130 - protein, 17 aa, Artificial Sequence
  source: /note="Description of Artificial Sequence: Synthetic peptide"
AREAAAELFNALAAAVE

SEQ ID NO: 1131 - protein, 17 aa, Artificial Sequence
  source: /note="Description of Artificial Sequence: Synthetic peptide"
AREKNAEAFAKAKADAE

SEQ ID NO: 1132 - protein, 17 aa, Artificial Sequence
  source: /note="Description of Artificial Sequence: Synthetic peptide"
ARAKNAALANKLKADVA

SEQ ID NO: 1133 - protein, 17 aa, Artificial Sequence
  source: /note="Description of Artificial Sequence: Synthetic peptide"
VAEKNVELFNKLKVDVE

SEQ ID NO: 1134 - protein, 17 aa, Artificial Sequence
  source: /note="Description of Artificial Sequence: Synthetic peptide"
AMAERELEAYQAINDAA

SEQ ID NO: 1135 - protein, 17 aa, Artificial Sequence
  source: /note="Description of Artificial Sequence: Synthetic peptide"
KMDERELEKAAKIAAAK

SEQ ID NO: 1136 - protein, 17 aa, Artificial Sequence
  source: /note="Description of Artificial Sequence: Synthetic peptide"
KADAREAEKYQKANDAK

SEQ ID NO: 1137 - protein, 17 aa, Artificial Sequence
  source: /note="Description of Artificial Sequence: Synthetic peptide"
KMDEAALAKYQKINDVK

SEQ ID NO: 1138 - protein, 17 aa, Artificial Sequence
  source: /note="Description of Artificial Sequence: Synthetic peptide"
ALANLRRLAAAFAVAWE

SEQ ID NO: 1139 - protein, 17 aa, Artificial Sequence
  source: /note="Description of Artificial Sequence: Synthetic peptide"
DAAAARRLASDFGAKWE

SEQ ID NO: 1140 - protein, 17 aa, Artificial Sequence
  source: /note="Description of Artificial Sequence: Synthetic peptide"
DLVNLRRAASDAGVKWA

SEQ ID NO: 1141 - protein, 17 aa, Artificial Sequence
  source: /note="Description of Artificial Sequence: Synthetic peptide"
DLANLAALVSDFGVKAE

SEQ ID NO: 1142 - protein, 17 aa, Artificial Sequence
  source: /note="Description of Artificial Sequence: Synthetic peptide"
EADWDEYAAQIAAQITD

SEQ ID NO: 1143 - protein, 17 aa, Artificial Sequence
  source: /note="Description of Artificial Sequence: Synthetic peptide"
EKAWAEYSGQIKKQIAA

SEQ ID NO: 1144 - protein, 17 aa, Artificial Sequence
  source: /note="Description of Artificial Sequence: Synthetic peptide"
EKDWDEASGAAKKAITD

SEQ ID NO: 1145 - protein, 17 aa, Artificial Sequence
  source: /note="Description of Artificial Sequence: Synthetic peptide"
AKDADAYSGQIKKQATD

SEQ ID NO: 1146 - protein, 17 aa, Artificial Sequence
  source: /note="Description of Artificial Sequence: Synthetic peptide"
AQALTIMAQRITAGLAA

SEQ ID NO: 1147 - protein, 17 aa, Artificial Sequence
  source: /note="Description of Artificial Sequence: Synthetic peptide"
SAKLAIMKQRIAAALKK

SEQ ID NO: 1148 - protein, 17 aa, Artificial Sequence
  source: /note="Description of Artificial Sequence: Synthetic peptide"
SQKATIAKARITAGAKK

SEQ ID NO: 1149 - protein, 17 aa, Artificial Sequence
  source: /note="Description of Artificial Sequence: Synthetic peptide"
SQKLTAMKQAATVGLKK

SEQ ID NO: 1150 - protein, 17 aa, Artificial Sequence
  source: /note="Description of Artificial Sequence: Synthetic peptide"
AHAIENLNLRIAIAINA

SEQ ID NO: 1151 - protein, 17 aa, Artificial Sequence
  source: /note="Description of Artificial Sequence: Synthetic peptide"
KHGIEAAALRITIDIAK

SEQ ID NO: 1152 - protein, 17 aa, Artificial Sequence
  source: /note="Description of Artificial Sequence: Synthetic peptide"
KAGAENLNARATIDINK

SEQ ID NO: 1153 - protein, 17 aa, Artificial Sequence
  source: /note="Description of Artificial Sequence: Synthetic peptide"
KHGIANLNLAITADANK

SEQ ID NO: 1154 - protein, 17 aa, Artificial Sequence
  source: /note="Description of Artificial Sequence: Synthetic peptide"
ARAAVLARIAIPRAFVA

SEQ ID NO: 1155 - protein, 17 aa, Artificial Sequence
  source: /note="Description of Artificial Sequence: Synthetic peptide"
SRKAAANRAAIPRGFAK

SEQ ID NO: 1156 - protein, 17 aa, Artificial Sequence
  source: /note="Description of Artificial Sequence: Synthetic peptide"
SRKVVLNRIAAARGAVK

SEQ ID NO: 1157 - protein, 17 aa, Artificial Sequence
  source: /note="Description of Artificial Sequence: Synthetic peptide"
SAKAVLNAIVIPAGFVK

SEQ ID NO: 1158 - protein, 17 aa, Artificial Sequence
  source: /note="Description of Artificial Sequence: Synthetic peptide"
RHILGWQEAEAVAAAIR

SEQ ID NO: 1159 - protein, 17 aa, Artificial Sequence
  source: /note="Description of Artificial Sequence: Synthetic peptide"
RHIAAWAESEKASKKIR

SEQ ID NO: 1160 - protein, 17 aa, Artificial Sequence
  source: /note="Description of Artificial Sequence: Synthetic peptide"
RAALGWQASEKVSKKAR

SEQ ID NO: 1161 - protein, 17 aa, Artificial Sequence
  source: /note="Description of Artificial Sequence: Synthetic peptide"
AHILGAQESAKVSKKIA

SEQ ID NO: 1162 - protein, 17 aa, Artificial Sequence
  source: /note="Description of Artificial Sequence: Synthetic peptide"
EAECEILLAAEAEELAA

SEQ ID NO: 1163 - protein, 17 aa, Artificial Sequence
  source: /note="Description of Artificial Sequence: Synthetic peptide"
EAEAEIAASKEYEEASK

SEQ ID NO: 1164 - protein, 17 aa, Artificial Sequence
  source: /note="Description of Artificial Sequence: Synthetic peptide"
AAACAALLSKEYEELSK

SEQ ID NO: 1165 - protein, 17 aa, Artificial Sequence
  source: /note="Description of Artificial Sequence: Synthetic peptide"
EVECEILLSKAYAALSK

SEQ ID NO: 1166 - protein, 17 aa, Artificial Sequence
  source: /note="Description of Artificial Sequence: Synthetic peptide"
QFFQAADYDAMARINAL

SEQ ID NO: 1167 - protein, 17 aa, Artificial Sequence
  source: /note="Description of Artificial Sequence: Synthetic peptide"
QFFQSKAAAKMTRIAGL

SEQ ID NO: 1168 - protein, 17 aa, Artificial Sequence
  source: /note="Description of Artificial Sequence: Synthetic peptide"
AFFASKDYDKATRINGA

SEQ ID NO: 1169 - protein, 17 aa, Artificial Sequence
  source: /note="Description of Artificial Sequence: Synthetic peptide"
QAAQSKDYDKMTAANGL

SEQ ID NO: 1170 - protein, 17 aa, Artificial Sequence
  source: /note="Description of Artificial Sequence: Synthetic peptide"
AEANALIALMAVALMAQ

SEQ ID NO: 1171 - protein, 17 aa, Artificial Sequence
  source: /note="Description of Artificial Sequence: Synthetic peptide"
YEKAKAIALMAAYLMGA

SEQ ID NO: 1172 - protein, 17 aa, Artificial Sequence
  source: /note="Description of Artificial Sequence: Synthetic peptide"
YEKNKLIAAAAVYAAGQ

SEQ ID NO: 1173 - protein, 17 aa, Artificial Sequence
  source: /note="Description of Artificial Sequence: Synthetic peptide"
YAKNKLAVLMVVYLMGQ

SEQ ID NO: 1174 - protein, 17 aa, Artificial Sequence
  source: /note="Description of Artificial Sequence: Synthetic peptide"
LRILFAEHAALDDIAAT

SEQ ID NO: 1175 - protein, 17 aa, Artificial Sequence
  source: /note="Description of Artificial Sequence: Synthetic peptide"
ARILFKEHTKLAAITKA

SEQ ID NO: 1176 - protein, 17 aa, Artificial Sequence
  source: /note="Description of Artificial Sequence: Synthetic peptide"
LRAAFKEATKADDITKT

SEQ ID NO: 1177 - protein, 17 aa, Artificial Sequence
  source: /note="Description of Artificial Sequence: Synthetic peptide"
LAILAKAHTKLDDATKT

SEQ ID NO: 1178 - protein, 17 aa, Artificial Sequence
  source: /note="Description of Artificial Sequence: Synthetic peptide"
TVDFAIADAVTVAIPFA

SEQ ID NO: 1179 - protein, 17 aa, Artificial Sequence
  source: /note="Description of Artificial Sequence: Synthetic peptide"
AVAFKISAKVAVKIPFS

SEQ ID NO: 1180 - protein, 17 aa, Artificial Sequence
  source: /note="Description of Artificial Sequence: Synthetic peptide"
TADFKASDKATAKIPFS

SEQ ID NO: 1181 - protein, 17 aa, Artificial Sequence
  source: /note="Description of Artificial Sequence: Synthetic peptide"
TVDAKISDKVTVKAAAS

SEQ ID NO: 1182 - protein, 17 aa, Artificial Sequence
  source: /note="Description of Artificial Sequence: Synthetic peptide"
NYPALVYAMAAAYVDNI

SEQ ID NO: 1183 - protein, 17 aa, Artificial Sequence
  source: /note="Description of Artificial Sequence: Synthetic peptide"
NAPSLVATMSSKAVANI

SEQ ID NO: 1184 - protein, 17 aa, Artificial Sequence
  source: /note="Description of Artificial Sequence: Synthetic peptide"
AYPSLAYTMSSKYADAI

SEQ ID NO: 1185 - protein, 17 aa, Artificial Sequence
  source: /note="Description of Artificial Sequence: Synthetic peptide"
NYASAVYTASSKYVDNA

SEQ ID NO: 1186 - protein, 17 aa, Artificial Sequence
  source: /note="Description of Artificial Sequence: Synthetic peptide"
GNYGFANADADAPILGA

SEQ ID NO: 1187 - protein, 17 aa, Artificial Sequence
  source: /note="Description of Artificial Sequence: Synthetic peptide"
ANYAFSNKAKDKPILAK

SEQ ID NO: 1188 - protein, 17 aa, Artificial Sequence
  source: /note="Description of Artificial Sequence: Synthetic peptide"
GAAGFSAKDKAKPILGK

SEQ ID NO: 1189 - protein, 17 aa, Artificial Sequence
  source: /note="Description of Artificial Sequence: Synthetic peptide"
GNYGASNKDKDKAAAGK

SEQ ID NO: 1190 - protein, 17 aa, Artificial Sequence
  source: /note="Description of Artificial Sequence: Synthetic peptide"
IAAIEAQRMEFIAEVLA

SEQ ID NO: 1191 - protein, 17 aa, Artificial Sequence
  source: /note="Description of Artificial Sequence: Synthetic peptide"
IDVIEKARAEFIKEAAG

SEQ ID NO: 1192 - protein, 17 aa, Artificial Sequence
  source: /note="Description of Artificial Sequence: Synthetic peptide"
ADVAEKQRMEAAKEVLG

SEQ ID NO: 1193 - protein, 17 aa, Artificial Sequence
  source: /note="Description of Artificial Sequence: Synthetic peptide"
IDVIAKQAMAFIKAVLG

SEQ ID NO: 1194 - protein, 17 aa, Artificial Sequence
  source: /note="Description of Artificial Sequence: Synthetic peptide"
FEAYLFDDAIIDAAAFA

SEQ ID NO: 1195 - protein, 17 aa, Artificial Sequence
  source: /note="Description of Artificial Sequence: Synthetic peptide"
FEKALFAAKIIAKSKFA

SEQ ID NO: 1196 - protein, 17 aa, Artificial Sequence
  source: /note="Description of Artificial Sequence: Synthetic peptide"
AEKYAFDDKAADKSKFA

SEQ ID NO: 1197 - protein, 17 aa, Artificial Sequence
  source: /note="Description of Artificial Sequence: Synthetic peptide"
FAKYLADDKIIDKSKAV

SEQ ID NO: 1198 - protein, 17 aa, Artificial Sequence
  source: /note="Description of Artificial Sequence: Synthetic peptide"
AAAAHIAFAEIAEELVE

SEQ ID NO: 1199 - protein, 17 aa, Artificial Sequence
  source: /note="Description of Artificial Sequence: Synthetic peptide"
DTATAASFAEIVEEAAE

SEQ ID NO: 1200 - protein, 17 aa, Artificial Sequence
  source: /note="Description of Artificial Sequence: Synthetic peptide"
DTATHISAAAAVAELVE

SEQ ID NO: 1201 - protein, 17 aa, Artificial Sequence
  source: /note="Description of Artificial Sequence: Synthetic peptide"
DTVTHISFVEIVEALVA

SEQ ID NO: 1202 - protein, 9 aa, Artificial Sequence
  source: /note="Description of Artificial Sequence: Synthetic peptide"
AAWAADRLA

SEQ ID NO: 1203 - protein, 9 aa, Artificial Sequence
  source: /note="Description of Artificial Sequence: Synthetic peptide"
KGADKAAAT

SEQ ID NO: 1204 - protein, 17 aa, Artificial Sequence
  source: /note="Description of Artificial Sequence: Synthetic peptide"
LAALAAARNKALHAEIL

SEQ ID NO: 1205 - protein, 17 aa, Artificial Sequence
  source: /note="Description of Artificial Sequence: Synthetic peptide"
ATKAKDARNKALHGEAA

SEQ ID NO: 1206 - protein, 17 aa, Artificial Sequence
  source: /note="Description of Artificial Sequence: Synthetic peptide"
LTKLKDVRNKALHGAIL

SEQ ID NO: 1207 - protein, 17 aa, Artificial Sequence
  source: /note="Description of Artificial Sequence: Synthetic peptide"
TGTAFDETAALINELAA

SEQ ID NO: 1208 - protein, 17 aa, Artificial Sequence
  source: /note="Description of Artificial Sequence: Synthetic peptide"
AAASFDEAKSLINELKK

SEQ ID NO: 1209 - protein, 17 aa, Artificial Sequence
  source: /note="Description of Artificial Sequence: Synthetic peptide"
TGTSFAETKSAIAEAKK

SEQ ID NO: 1210 - protein, 17 aa, Artificial Sequence
  source: /note="Description of Artificial Sequence: Synthetic peptide"
TGTSADATKSLANALKK

SEQ ID NO: 1211 - DNA, 51 bp, Artificial Sequence
  source: /note="Description of Artificial Sequence: Synthetic oligonucleotide"
gccgccatcgagctggccgccgaagaagccgccttcgccttcaatcaggcc

SEQ ID NO: 1212 - DNA, 51 bp, Artificial Sequence
  source: /note="Description of Artificial Sequence: Synthetic oligonucleotide"
aatggcgccgaggccaagaaggaagaagccgccttctacttcgccgccgcc

SEQ ID NO: 1213 - DNA, 51 bp, Artificial Sequence
  source: /note="Description of Artificial Sequence: Synthetic oligonucleotide"
aatggcatcgccctgaagaaggccgaagccgccgcctacgccaatcaggcc

SEQ ID NO: 1214 - DNA, 51 bp, Artificial Sequence
  source: /note="Description of Artificial Sequence: Synthetic oligonucleotide"
aatggcatcgagctgaagaaggaagccgtggtgttctacttcaatcaggtg

SEQ ID NO: 1215 - DNA, 51 bp, Artificial Sequence
  source: /note="Description of Artificial Sequence: Synthetic oligonucleotide"
gagctggccctggccgccattgaggccaacatcttcgccgccgagagaaga

SEQ ID NO: 1216 - DNA, 51 bp, Artificial Sequence
  source: /note="Description of Artificial Sequence: Synthetic oligonucleotide"
gaggccaacgccaaggccgccgaggacgccatcttcgacaaggagagaaga

SEQ ID NO: 1217 - DNA, 51 bp, Artificial Sequence
  source: /note="Description of Artificial Sequence: Synthetic oligonucleotide"
gccctgaacctgaaggccattgccgacaacgccgccgacaaggagagaaga

SEQ ID NO: 1218 - DNA, 51 bp, Artificial Sequence
  source: /note="Description of Artificial Sequence: Synthetic oligonucleotide"
gagctgaacctgaaggtgattgaggacaacatcttcgacaaggccgccgcc

SEQ ID NO: 1219 - DNA, 51 bp, Artificial Sequence
  source: /note="Description of Artificial Sequence: Synthetic oligonucleotide"
gccgccctgctggccgccccccagatcctggccgccatggagaactttatc

SEQ ID NO: 1220 - DNA, 51 bp, Artificial Sequence
  source: /note="Description of Artificial Sequence: Synthetic oligonucleotide"
aagacagccgccaacaaccccgccatcctggccaagatggaggcctttatc

SEQ ID NO: 1221 - DNA, 51 bp, Artificial Sequence
  source: /note="Description of Artificial Sequence: Synthetic oligonucleotide"
aagacactgctgaacaacccccaggccgccgccaaggccgagaactttgcc

SEQ ID NO: 1222 - DNA, 51 bp, Artificial Sequence
  source: /note="Description of Artificial Sequence: Synthetic oligonucleotide"
aagacactgctgaacaacgcccagatcctggtgaagatggccaacgccatc

SEQ ID NO: 1223 - DNA, 51 bp, Artificial Sequence
  source: /note="Description of Artificial Sequence: Synthetic oligonucleotide"
ttcaatttccgggccgtggccgccaacgccgccgccgaaatcgactgcctg

SEQ ID NO: 1224 - DNA, 51 bp, Artificial Sequence
  source: /note="Description of Artificial Sequence: Synthetic oligonucleotide"
ttcgccttccgggacgccaccaaggccgccaagggcgaaatcgcctgcctg

SEQ ID NO: 1225 - DNA, 51 bp, Artificial Sequence
  source: /note="Description of Artificial Sequence: Synthetic oligonucleotide"
gccaatttccgggacgtgaccaagaacgccaagggcgaagccgacgccgcc

SEQ ID NO: 1226 - DNA, 51 bp, Artificial Sequence
  source: /note="Description of Artificial Sequence: Synthetic oligonucleotide"
ttcaatgccgccgacgtgaccaagaacgtgaagggcgccatcgactgcctg

SEQ ID NO: 1227 - DNA, 51 bp, Artificial Sequence
  source: /note="Description of Artificial Sequence: Synthetic oligonucleotide"
gccctggccctgagagagctgcggaacttttacagccacgccgcccacgcc

SEQ ID NO: 1228 - DNA, 51 bp, Artificial Sequence
  source: /note="Description of Artificial Sequence: Synthetic oligonucleotide"
ctggccaaggccagagaggcccggaacttttacagccactacgtggccaag

SEQ ID NO: 1229 - DNA, 51 bp, Artificial Sequence
  source: /note="Description of Artificial Sequence: Synthetic oligonucleotide"
ctgctgaagctggccgccctgcggaacttttacagccactacgtgcacaag

SEQ ID NO: 1230 - DNA, 51 bp, Artificial Sequence
  source: /note="Description of Artificial Sequence: Synthetic oligonucleotide"
cgggacgtcagagaactggccgccgccgaggccccgatcctggaggcctac

SEQ ID NO: 1231 - DNA, 51 bp, Artificial Sequence
  source: /note="Description of Artificial Sequence: Synthetic oligonucleotide"
cgggccgccagagaagccagcaagggcgagaagccgatcctggagaaggcc

SEQ ID NO: 1232 - DNA, 51 bp, Artificial Sequence
  source: /note="Description of Artificial Sequence: Synthetic oligonucleotide"
cgggacgtcagagccctgagcaagggcgccaagccggccgccgagaagtac

SEQ ID NO: 1233 - DNA, 51 bp, Artificial Sequence
  source: /note="Description of Artificial Sequence: Synthetic oligonucleotide"
gccgacgtcgccgaactgagcaagggcgagaaggccatcctggccaagtac

SEQ ID NO: 1234 - DNA, 51 bp, Artificial Sequence
  source: /note="Description of Artificial Sequence: Synthetic oligonucleotide"
taccagttcgccatcgaagccgccgccgccgagaacgtggccctcgaaatc

SEQ ID NO: 1235 - DNA, 51 bp, Artificial Sequence
  source: /note="Description of Artificial Sequence: Synthetic oligonucleotide"
gccgccttcgccatcgaatccaccggctctgaggccgccaagctcgaaatc

SEQ ID NO: 1236 - DNA, 51 bp, Artificial Sequence
  source: /note="Description of Artificial Sequence: Synthetic oligonucleotide"
taccaggccgccgccgaatccaccggctctgagaacgtgaaggccgaagcc

SEQ ID NO: 1237 - DNA, 51 bp, Artificial Sequence
  source: /note="Description of Artificial Sequence: Synthetic oligonucleotide"
taccagttcgtgatcgcctccaccggctctgccaacgtgaagctcgccatc

SEQ ID NO: 1238 - DNA, 51 bp, Artificial Sequence
  source: /note="Description of Artificial Sequence: Synthetic oligonucleotide"
atcgaagccgccgcctggctggccgccgccgccgccctgttcttcctgtgc

SEQ ID NO: 1239 - DNA, 51 bp, Artificial Sequence
  source: /note="Description of Artificial Sequence: Synthetic oligonucleotide"
atcgaaaacgacgcctgggccgccgacgccggcgtggccttcttcgccgcc

SEQ ID NO: 1240 - DNA, 51 bp, Artificial Sequence
  source: /note="Description of Artificial Sequence: Synthetic oligonucleotide"
gccgccaacgacgcctggctggccgacgccggcgtgctggccgccctgtgc

SEQ ID NO: 1241 - DNA, 51 bp, Artificial Sequence
  source: /note="Description of Artificial Sequence: Synthetic oligonucleotide"
atcgaaaacgacgtggccctggtggacgtgggcgtgctgttcttcctgtgc

SEQ ID NO: 1242 - DNA, 51 bp, Artificial Sequence
  source: /note="Description of Artificial Sequence: Synthetic oligonucleotide"
atcttcctggccgccgcccaggcaaacgccctgatcgccggcatcagcggc

SEQ ID NO: 1243 - DNA, 51 bp, Artificial Sequence
  source: /note="Description of Artificial Sequence: Synthetic oligonucleotide"
atcttcctgaagaagagccaggcagccaagctgatcagcgccatcgccgcc

SEQ ID NO: 1244 - DNA, 51 bp, Artificial Sequence
  source: /note="Description of Artificial Sequence: Synthetic oligonucleotide"
gccttcgccaagaagagcgccgcaaacaaggccatcagcggcatcagcggc

SEQ ID NO: 1245 - DNA, 51 bp, Artificial Sequence
  source: /note="Description of Artificial Sequence: Synthetic oligonucleotide"
atcgccctgaagaagagccaggtgaacaagctggccagcggcgccagcggc

SEQ ID NO: 1246 - DNA, 51 bp, Artificial Sequence
  source: /note="Description of Artificial Sequence: Synthetic oligonucleotide"
ttcgccagaaacgccgacgccgcccagcctcggagaaacctgttcgcctac

SEQ ID NO: 1247 - DNA, 51 bp, Artificial Sequence
  source: /note="Description of Artificial Sequence: Synthetic oligonucleotide"
ttcaagagagccgacgccaccggccagcctcggagagccctgttcaccgcc

SEQ ID NO: 1248 - DNA, 51 bp, Artificial Sequence
  source: /note="Description of Artificial Sequence: Synthetic oligonucleotide"
gccaagagaaacgacgacaccggcgcccctcggagaaacgccgccacctac

SEQ ID NO: 1249 - DNA, 51 bp, Artificial Sequence
  source: /note="Description of Artificial Sequence: Synthetic oligonucleotide"
ttcaaggccaacgacgacaccggccaggccgccgccaacctgttcacctac

SEQ ID NO: 1250 - DNA, 51 bp, Artificial Sequence
  source: /note="Description of Artificial Sequence: Synthetic oligonucleotide"
ttcgccatccgggaggccgccgccgtggtgcccgaaatgcaggcccacttc

SEQ ID NO: 1251 - DNA, 51 bp, Artificial Sequence
  source: /note="Description of Artificial Sequence: Synthetic oligonucleotide"
ttctccatccgggagggctacaaggccgcccccgaaatggccaaggccttc

SEQ ID NO: 1252 - DNA, 51 bp, Artificial Sequence
  source: /note="Description of Artificial Sequence: Synthetic oligonucleotide"
gcctccgcccgggagggctacaaggtggtgcccgaagcccagaagcacgcc

SEQ ID NO: 1253 - DNA, 51 bp, Artificial Sequence
  source: /note="Description of Artificial Sequence: Synthetic oligonucleotide"
ttctccatcgccgccggctacaaggtggtggccgccatgcagaagcacttc

SEQ ID NO: 1254 - DNA, 51 bp, Artificial Sequence
  source: /note="Description of Artificial Sequence: Synthetic oligonucleotide"
ctgctgttcgccctggtgaaccacctggccaaccaggccgccgccatcgaa

SEQ ID NO: 1255 - DNA, 51 bp, Artificial Sequence
  source: /note="Description of Artificial Sequence: Synthetic oligonucleotide"
ctgctgttctccctggccgcccacctgagcgccgccgacgattatatcgaa

SEQ ID NO: 1256 - DNA, 51 bp, Artificial Sequence
  source: /note="Description of Artificial Sequence: Synthetic oligonucleotide"
gccgccttctccgccgtgaaccacgccagcaaccaggacgattatatcgaa

SEQ ID NO: 1257 - DNA, 51 bp, Artificial Sequence
  source: /note="Description of Artificial Sequence: Synthetic oligonucleotide"
ctgctggcctccctggtgaacgccctgagcaaccaggacgattatgccgcc

SEQ ID NO: 1258 - DNA, 51 bp, Artificial Sequence
  source: /note="Description of Artificial Sequence: Synthetic oligonucleotide"
gccgcccaccagcccgccgccatcgccgaggccctcttcttccaccggatt

SEQ ID NO: 1259 - DNA, 51 bp, Artificial Sequence
  source: /note="Description of Artificial Sequence: Synthetic oligonucleotide"
aaggccgccgccccctacgacatcggcgagggcgccttcttcgcccggatt

SEQ ID NO: 1260 - DNA, 51 bp, Artificial Sequence
  source: /note="Description of Artificial Sequence: Synthetic oligonucleotide"
aaggcccaccagccctacgacgccggcgagggcctcgccgcccaccgggcc

SEQ ID NO: 1261 - DNA, 51 bp, Artificial Sequence
  source: /note="Description of Artificial Sequence: Synthetic oligonucleotide"
aaggtgcaccaggcctacgacatcggcgccggcctcttcttccacgccatt

SEQ ID NO: 1262 - DNA, 51 bp, Artificial Sequence
  source: /note="Description of Artificial Sequence: Synthetic oligonucleotide"
gccgccgccttcctgaacatcgccgccatcctgagaaacatggccttctac

SEQ ID NO: 1263 - DNA, 51 bp, Artificial Sequence
  source: /note="Description of Artificial Sequence: Synthetic oligonucleotide"
gccagcaccttcgccgccatctccggaatcctgagagccatgaagttcgcc

SEQ ID NO: 1264 - DNA, 51 bp, Artificial Sequence
  source: /note="Description of Artificial Sequence: Synthetic oligonucleotide"
gccagcaccttcctgaacgcctccggagccgccagaaacgccaagttctac

SEQ ID NO: 1265 - DNA, 51 bp, Artificial Sequence
  source: /note="Description of Artificial Sequence: Synthetic oligonucleotide"
gtgagcaccgccctgaacatctccggaatcctggccaacatgaaggcctac

SEQ ID NO: 1266 - DNA, 51 bp, Artificial Sequence
  source: /note="Description of Artificial Sequence: Synthetic oligonucleotide"
gcctatcaggccgccagactggtggagcagagagccgagctggcccgggaa

SEQ ID NO: 1267 - DNA, 51 bp, Artificial Sequence
  source: /note="Description of Artificial Sequence: Synthetic oligonucleotide"
accgccgccagcaagagactggccgaggccagaggcgagctgaagcgggaa

SEQ ID NO: 1268 - DNA, 51 bp, Artificial Sequence
  source: /note="Description of Artificial Sequence: Synthetic oligonucleotide"
acctatcagagcaagagagccgtggcccagagaggcgccgccaagcgggaa

SEQ ID NO: 1269 - DNA, 51 bp, Artificial Sequence
  source: /note="Description of Artificial Sequence: Synthetic oligonucleotide"
acctatcagagcaaggccctggtggagcaggccggcgagctgaaggccgcc

SEQ ID NO: 1270 - DNA, 51 bp, Artificial Sequence
  source: /note="Description of Artificial Sequence: Synthetic oligonucleotide"
gccgccatcttcgcctgggaagaaccgtttcaggccaatgccgcctttgag

SEQ ID NO: 1271 - DNA, 51 bp, Artificial Sequence
  source: /note="Description of Artificial Sequence: Synthetic oligonucleotide"
aaggacgccgccgcctgggaagaaccgtttgccggcgcctcctactttgag

SEQ ID NO: 1272 - DNA, 51 bp, Artificial Sequence
  source: /note="Description of Artificial Sequence: Synthetic oligonucleotide"
aaggacatcttcgcctgggccgccccggcccagggcaattcctacgccgag

SEQ ID NO: 1273 - DNA, 51 bp, Artificial Sequence
  source: /note="Description of Artificial Sequence: Synthetic oligonucleotide"
aaggacatcttcgtggccgaagaagcctttcagggcaattcctactttgcc

SEQ ID NO: 1274 - DNA, 51 bp, Artificial Sequence
  source: /note="Description of Artificial Sequence: Synthetic oligonucleotide"
atcaacgcccacgccgccgtgattgccgaggacgagctggccgagctgtgc

SEQ ID NO: 1275 - DNA, 51 bp, Artificial Sequence
  source: /note="Description of Artificial Sequence: Synthetic oligonucleotide"
atcgccggccacaagggcgccattggcgaggccgaggccaaggagctgtgc

SEQ ID NO: 1276 - DNA, 51 bp, Artificial Sequence
  source: /note="Description of Artificial Sequence: Synthetic oligonucleotide"
gccaacggcgccaagggcgtgattggcgaggacgagctgaaggaggccgcc

SEQ ID NO: 1277 - DNA, 51 bp, Artificial Sequence
  source: /note="Description of Artificial Sequence: Synthetic oligonucleotide"
atcaacggccacaagggcgtggccggcgccgacgccctgaaggccctgtgc

SEQ ID NO: 1278 - DNA, 51 bp, Artificial Sequence
  source: /note="Description of Artificial Sequence: Synthetic oligonucleotide"
gccgccttcctgatcgccaaccaggccgccaacgccgtggaggcccggatc

SEQ ID NO: 1279 - DNA, 51 bp, Artificial Sequence
  source: /note="Description of Artificial Sequence: Synthetic oligonucleotide"
tacgccttcctgatcggcgccgccgacgccgccaaggccgagggccggatc

SEQ ID NO: 1280 - DNA, 51 bp, Artificial Sequence
  source: /note="Description of Artificial Sequence: Synthetic oligonucleotide"
tacgccgccgccgccggcaaccaggacgccaacaaggtggagggccgggcc

SEQ ID NO: 1281 - DNA, 51 bp, Artificial Sequence
  source: /note="Description of Artificial Sequence: Synthetic oligonucleotide"
tacgtgttcctgatcggcaaccaggacgtgaacaaggtggccggcgccatc

SEQ ID NO: 1282 - DNA, 51 bp, Artificial Sequence
  source: /note="Description of Artificial Sequence: Synthetic oligonucleotide"
gcccagttcctggaggccttcagagccgccaacgccgtgcagcaggtggcc

SEQ ID NO: 1283 - DNA, 51 bp, Artificial Sequence
  source: /note="Description of Artificial Sequence: Synthetic oligonucleotide"
accgccttcctggagaagttcagaaacgccgccagcgcccagcaggccaag

SEQ ID NO: 1284 - DNA, 51 bp, Artificial Sequence
  source: /note="Description of Artificial Sequence: Synthetic oligonucleotide"
acccaggccgccgagaagttcagaaacgccaacagcgtggccgccgtgaag

SEQ ID NO: 1285 - DNA, 51 bp, Artificial Sequence
  source: /note="Description of Artificial Sequence: Synthetic oligonucleotide"
acccagttcctggccaaggccgccaacgtgaacagcgtgcagcaggtgaag

SEQ ID NO: 1286 - DNA, 51 bp, Artificial Sequence
  source: /note="Description of Artificial Sequence: Synthetic oligonucleotide"
gccgccgagatgctggcccctgaagccttccccgccaacgcctttgccgag

SEQ ID NO: 1287 - DNA, 51 bp, Artificial Sequence
  source: /note="Description of Artificial Sequence: Synthetic oligonucleotide"
gacgacgaggccgccaagcctgaatatgcccccgccgcctactttgccgag

SEQ ID NO: 1288 - DNA, 51 bp, Artificial Sequence
  source: /note="Description of Artificial Sequence: Synthetic oligonucleotide"
gacgacgccatgctgaagcctgcctatttccccgccaactacgccgccgcc

SEQ ID NO: 1289 - DNA, 51 bp, Artificial Sequence
  source: /note="Description of Artificial Sequence: Synthetic oligonucleotide"
gacgacgagatgctgaaggccgaatatttcgccgtgaactactttgtggag

SEQ ID NO: 1290 - DNA, 51 bp, Artificial Sequence
  source: /note="Description of Artificial Sequence: Synthetic oligonucleotide"
gccgccgtggcccggatcgccgaccgggtgctgaacagactgaacgccgcc

SEQ ID NO: 1291 - DNA, 51 bp, Artificial Sequence
  source: /note="Description of Artificial Sequence: Synthetic oligonucleotide"
agcggcgccggccggatcaaggcccgggtgctggccagactggccaaggcc

SEQ ID NO: 1292 - DNA, 51 bp, Artificial Sequence
  source: /note="Description of Artificial Sequence: Synthetic oligonucleotide"
agcggcgtgggccgggccaaggaccgggccgccaacagagccaacaaggcc

SEQ ID NO: 1293 - DNA, 51 bp, Artificial Sequence
  source: /note="Description of Artificial Sequence: Synthetic oligonucleotide"
agcggcgtgggcgccatcaaggacgccgtgctgaacgccctgaacaaggtg

SEQ ID NO: 1294 - DNA, 51 bp, Artificial Sequence
  source: /note="Description of Artificial Sequence: Synthetic oligonucleotide"
atcgccagcaacgccgccgccgccggcgagatcatcgcctatgacgccatg

SEQ ID NO: 1295 - DNA, 51 bp, Artificial Sequence
  source: /note="Description of Artificial Sequence: Synthetic oligonucleotide"
atcaaggccaacaaggccaagaaggccgagatcatcgccgccgccaagatg

SEQ ID NO: 1296 - DNA, 51 bp, Artificial Sequence
  source: /note="Description of Artificial Sequence: Synthetic oligonucleotide"
gccaagagcgccaaggccaagaagggcgaggccatcgcctatgacaaggcc

SEQ ID NO: 1297 - DNA, 51 bp, Artificial Sequence
  source: /note="Description of Artificial Sequence: Synthetic oligonucleotide"
atcaagagcaacaaggtgaagaagggcgccatcgccgtgtatgacaagatg

SEQ ID NO: 1298 - DNA, 51 bp, Artificial Sequence
  source: /note="Description of Artificial Sequence: Synthetic oligonucleotide"
agagaagtgatggctttcatcgccgccgccctgcccgtggccgaggccctg

SEQ ID NO: 1299 - DNA, 51 bp, Artificial Sequence
  source: /note="Description of Artificial Sequence: Synthetic oligonucleotide"
agagaagccatggctttcatcaataactctgcccccgccgacgagaaggcc

SEQ ID NO: 1300 - DNA, 51 bp, Artificial Sequence
  source: /note="Description of Artificial Sequence: Synthetic oligonucleotide"
agagccgtggccgctgccgccaataactctctgcccgtggacgagaagctg

SEQ ID NO: 1301 - DNA, 51 bp, Artificial Sequence
  source: /note="Description of Artificial Sequence: Synthetic oligonucleotide"
gccgaagtgatggtgttcatcaataactctctggccgtggacgccaagctg

SEQ ID NO: 1302 - DNA, 51 bp, Artificial Sequence
  source: /note="Description of Artificial Sequence: Synthetic oligonucleotide"
gcccccgccgcctacgccagatacctggccatggtgagattctgggataga

SEQ ID NO: 1303 - DNA, 51 bp, Artificial Sequence
  source: /note="Description of Artificial Sequence: Synthetic oligonucleotide"
aagcccaaggatgccaagagagccctgggcatggccagattctgggccaga

SEQ ID NO: 1304 - DNA, 51 bp, Artificial Sequence
  source: /note="Description of Artificial Sequence: Synthetic oligonucleotide"
aaggccaaggattacaagagatacgccggcgccgtgagagcctgggataga

SEQ ID NO: 1305 - DNA, 51 bp, Artificial Sequence
  source: /note="Description of Artificial Sequence: Synthetic oligonucleotide"
aagcccaaggattacaaggcctacctgggcatggtggccttcgccgatgcc

SEQ ID NO: 1306 - DNA, 51 bp, Artificial Sequence
  source: /note="Description of Artificial Sequence: Synthetic oligonucleotide"
gaagccgacaatatcgcccgcgagttcgaaacggccgagtgggccgcctat

SEQ ID NO: 1307 - DNA, 51 bp, Artificial Sequence
  source: /note="Description of Artificial Sequence: Synthetic oligonucleotide"
gaaaaggccgccatcaagcgcgagttcgaagccaaggagtggagcaaggcc

SEQ ID NO: 1308 - DNA, 51 bp, Artificial Sequence
  source: /note="Description of Artificial Sequence: Synthetic oligonucleotide"
gccaaggacaatgccaagcgcgccgccgaaacgaaggagtggagcaagtat

SEQ ID NO: 1309 - DNA, 51 bp, Artificial Sequence
  source: /note="Description of Artificial Sequence: Synthetic oligonucleotide"
gaaaaggacaatatcaaggccgagttcgccacgaaggccgccagcaagtat

SEQ ID NO: 1310 - DNA, 51 bp, Artificial Sequence
  source: /note="Description of Artificial Sequence: Synthetic oligonucleotide"
ctgcccgccaacttctgggccgccgccaacctggagagagtggccgccctg

SEQ ID NO: 1311 - DNA, 51 bp, Artificial Sequence
  source: /note="Description of Artificial Sequence: Synthetic oligonucleotide"
gccccctccgccttctggaccgccaaggccctggagagagcctacggactg

SEQ ID NO: 1312 - DNA, 51 bp, Artificial Sequence
  source: /note="Description of Artificial Sequence: Synthetic oligonucleotide"
ctgccctccaacgcctggaccgccaagaacgccgccagagtgtacggagcc

SEQ ID NO: 1313 - DNA, 51 bp, Artificial Sequence
  source: /note="Description of Artificial Sequence: Synthetic oligonucleotide"
ctggcctccaacttcgccaccgtgaagaacctggaggccgtgtacggactg

SEQ ID NO: 1314 - DNA, 51 bp, Artificial Sequence
  source: /note="Description of Artificial Sequence: Synthetic oligonucleotide"
gcccgggaagccgccgcagagctgtttaacgccctggccgccgccgtggag

SEQ ID NO: 1315 - DNA, 51 bp, Artificial Sequence
  source: /note="Description of Artificial Sequence: Synthetic oligonucleotide"
gcccgggaaaagaacgcagaggcctttgccaaggccaaggccgacgccgag

SEQ ID NO: 1316 - DNA, 51 bp, Artificial Sequence
  source: /note="Description of Artificial Sequence: Synthetic oligonucleotide"
gcccgggccaagaacgcagccctggccaacaagctgaaggccgacgtggcc

SEQ ID NO: 1317 - DNA, 51 bp, Artificial Sequence
  source: /note="Description of Artificial Sequence: Synthetic oligonucleotide"
gtggccgaaaagaacgtggagctgtttaacaagctgaaggtggacgtggag

SEQ ID NO: 1318 - DNA, 51 bp, Artificial Sequence
  source: /note="Description of Artificial Sequence: Synthetic oligonucleotide"
gccatggccgaaagagagctggaagcctatcaggccatcaacgacgccgcc

SEQ ID NO: 1319 - DNA, 51 bp, Artificial Sequence
  source: /note="Description of Artificial Sequence: Synthetic oligonucleotide"
aagatggacgaaagagagctggaaaaggccgccaagatcgccgccgccaag

SEQ ID NO: 1320 - DNA, 51 bp, Artificial Sequence
  source: /note="Description of Artificial Sequence: Synthetic oligonucleotide"
aaggccgacgccagagaggccgaaaagtatcagaaggccaacgacgccaag

SEQ ID NO: 1321 - DNA, 51 bp, Artificial Sequence
  source: /note="Description of Artificial Sequence: Synthetic oligonucleotide"
aagatggacgaagccgccctggccaagtatcagaagatcaacgacgtgaag

SEQ ID NO: 1322 - DNA, 51 bp, Artificial Sequence
  source: /note="Description of Artificial Sequence: Synthetic oligonucleotide"
gccctggccaacctgcggcggctggccgccgccttcgccgtggcctgggag

SEQ ID NO: 1323 - DNA, 51 bp, Artificial Sequence
  source: /note="Description of Artificial Sequence: Synthetic oligonucleotide"
gatgccgccgccgcccggcggctggccagcgacttcggagccaagtgggag

SEQ ID NO: 1324 - DNA, 51 bp, Artificial Sequence
  source: /note="Description of Artificial Sequence: Synthetic oligonucleotide"
gatctggtgaacctgcggcgggccgccagcgacgccggagtgaagtgggcc

SEQ ID NO: 1325 - DNA, 51 bp, Artificial Sequence
  source: /note="Description of Artificial Sequence: Synthetic oligonucleotide"
gatctggccaacctggccgccctggtgagcgacttcggagtgaaggccgag

SEQ ID NO: 1326 - DNA, 51 bp, Artificial Sequence
  source: /note="Description of Artificial Sequence: Synthetic oligonucleotide"
gaggccgattgggacgagtacgccgcccagatcgccgcccagatcacagat

SEQ ID NO: 1327 - DNA, 51 bp, Artificial Sequence
  source: /note="Description of Artificial Sequence: Synthetic oligonucleotide"
gagaaggcctgggccgagtactccggccagatcaagaagcagatcgccgcc

SEQ ID NO: 1328 - DNA, 51 bp, Artificial Sequence
  source: /note="Description of Artificial Sequence: Synthetic oligonucleotide"
gagaaggattgggacgaggcctccggcgccgccaagaaggccatcacagat

SEQ ID NO: 1329 - DNA, 51 bp, Artificial Sequence
  source: /note="Description of Artificial Sequence: Synthetic oligonucleotide"
gccaaggatgccgacgcctactccggccagatcaagaagcaggccacagat

SEQ ID NO: 1330 - DNA, 51 bp, Artificial Sequence
  source: /note="Description of Artificial Sequence: Synthetic oligonucleotide"
gcccaggccctgaccatcatggcccagagaatcacagccggcctggccgcc

SEQ ID NO: 1331 - DNA, 51 bp, Artificial Sequence
  source: /note="Description of Artificial Sequence: Synthetic oligonucleotide"
tccgccaagctggccatcatgaagcagagaatcgccgccgccctgaagaag

SEQ ID NO: 1332 - DNA, 51 bp, Artificial Sequence
  source: /note="Description of Artificial Sequence: Synthetic oligonucleotide"
tcccagaaggccaccatcgccaaggccagaatcacagccggcgccaagaag

SEQ ID NO: 1333 - DNA, 51 bp, Artificial Sequence
  source: /note="Description of Artificial Sequence: Synthetic oligonucleotide"
tcccagaagctgaccgccatgaagcaggccgccacagtgggcctgaagaag

SEQ ID NO: 1334 - DNA, 51 bp, Artificial Sequence
  source: /note="Description of Artificial Sequence: Synthetic oligonucleotide"
gcccacgccatcgaaaacctgaacctgaggatcgccatcgccatcaacgcc

SEQ ID NO: 1335 - DNA, 51 bp, Artificial Sequence
  source: /note="Description of Artificial Sequence: Synthetic oligonucleotide"
aagcacggcatcgaagccgccgccctgaggatcaccatcgacatcgccaag

SEQ ID NO: 1336 - DNA, 51 bp, Artificial Sequence
  source: /note="Description of Artificial Sequence: Synthetic oligonucleotide"
aaggccggcgccgaaaacctgaacgccagggccaccatcgacatcaacaag

SEQ ID NO: 1337 - DNA, 51 bp, Artificial Sequence
  source: /note="Description of Artificial Sequence: Synthetic oligonucleotide"
aagcacggcatcgccaacctgaacctggccatcaccgccgacgccaacaag

SEQ ID NO: 1338 - DNA, 51 bp, Artificial Sequence
  source: /note="Description of Artificial Sequence: Synthetic oligonucleotide"
gccagagccgccgtgctggcccggatcgccatccccagagcctttgtggcc

SEQ ID NO: 1339 - DNA, 51 bp, Artificial Sequence
  source: /note="Description of Artificial Sequence: Synthetic oligonucleotide"
tccagaaaggccgccgccaatcgggccgccatccccagaggatttgccaag

SEQ ID NO: 1340 - DNA, 51 bp, Artificial Sequence
  source: /note="Description of Artificial Sequence: Synthetic oligonucleotide"
tccagaaaggtggtgctgaatcggatcgccgccgccagaggagccgtgaag

SEQ ID NO: 1341 - DNA, 51 bp, Artificial Sequence
  source: /note="Description of Artificial Sequence: Synthetic oligonucleotide"
tccgccaaggccgtgctgaatgccatcgtgatccccgccggatttgtgaag

SEQ ID NO: 1342 - DNA, 51 bp, Artificial Sequence
  source: /note="Description of Artificial Sequence: Synthetic oligonucleotide"
cggcacatcctgggctggcaggaagccgaggccgtggccgccgccatcaga

SEQ ID NO: 1343 - DNA, 51 bp, Artificial Sequence
  source: /note="Description of Artificial Sequence: Synthetic oligonucleotide"
cggcacatcgccgcctgggccgaatccgagaaggccagcaagaagatcaga

SEQ ID NO: 1344 - DNA, 51 bp, Artificial Sequence
  source: /note="Description of Artificial Sequence: Synthetic oligonucleotide"
cgggccgccctgggctggcaggcctccgagaaggtgagcaagaaggccaga

SEQ ID NO: 1345 - DNA, 51 bp, Artificial Sequence
  source: /note="Description of Artificial Sequence: Synthetic oligonucleotide"
gcccacatcctgggcgcccaggaatccgccaaggtgagcaagaagatcgcc

SEQ ID NO: 1346 - DNA, 51 bp, Artificial Sequence
  source: /note="Description of Artificial Sequence: Synthetic oligonucleotide"
gaagccgaatgcgagattctgctggccgccgaggccgaggagctggccgcc

SEQ ID NO: 1347 - DNA, 51 bp, Artificial Sequence
  source: /note="Description of Artificial Sequence: Synthetic oligonucleotide"
gaagccgaagccgagattgccgccagcaaggagtacgaggaggccagcaag

SEQ ID NO: 1348 - DNA, 51 bp, Artificial Sequence
  source: /note="Description of Artificial Sequence: Synthetic oligonucleotide"
gccgccgcctgcgccgccctgctgagcaaggagtacgaggagctgagcaag

SEQ ID NO: 1349 - DNA, 51 bp, Artificial Sequence
  source: /note="Description of Artificial Sequence: Synthetic oligonucleotide"
gaagtggaatgcgagattctgctgagcaaggcctacgccgccctgagcaag

SEQ ID NO: 1350 - DNA, 51 bp, Artificial Sequence
  source: /note="Description of Artificial Sequence: Synthetic oligonucleotide"
cagttctttcaggccgccgactacgacgccatggcccgcatcaacgccctg

SEQ ID NO: 1351 - DNA, 51 bp, Artificial Sequence
  source: /note="Description of Artificial Sequence: Synthetic oligonucleotide"
cagttctttcagagcaaggccgccgccaagatgacccgcatcgccggcctg

SEQ ID NO: 1352 - DNA, 51 bp, Artificial Sequence
  source: /note="Description of Artificial Sequence: Synthetic oligonucleotide"
gccttctttgccagcaaggactacgacaaggccacccgcatcaacggcgcc

SEQ ID NO: 1353 - DNA, 51 bp, Artificial Sequence
  source: /note="Description of Artificial Sequence: Synthetic oligonucleotide"
caggccgcccagagcaaggactacgacaagatgaccgccgccaacggcctg

SEQ ID NO: 1354 - DNA, 51 bp, Artificial Sequence
  source: /note="Description of Artificial Sequence: Synthetic oligonucleotide"
gccgaggccaatgccctgatcgccctgatggccgtggccctgatggcccag

SEQ ID NO: 1355 - DNA, 51 bp, Artificial Sequence
  source: /note="Description of Artificial Sequence: Synthetic oligonucleotide"
tacgagaaggccaaggccatcgccctgatggccgcctatctgatgggggcc

SEQ ID NO: 1356 - DNA, 51 bp, Artificial Sequence
  source: /note="Description of Artificial Sequence: Synthetic oligonucleotide"
tacgagaagaataagctgatcgccgccgccgccgtgtatgccgccgggcag

SEQ ID NO: 1357 - DNA, 51 bp, Artificial Sequence
  source: /note="Description of Artificial Sequence: Synthetic oligonucleotide"
tacgccaagaataagctggccgtgctgatggtggtgtatctgatggggcag

SEQ ID NO: 1358 - DNA, 51 bp, Artificial Sequence
  source: /note="Description of Artificial Sequence: Synthetic oligonucleotide"
ctgagaatcctgttcgccgagcacgccgccctggacgacatcgccgccacc

SEQ ID NO: 1359 - DNA, 51 bp, Artificial Sequence
  source: /note="Description of Artificial Sequence: Synthetic oligonucleotide"
gccagaatcctgttcaaggagcacaccaagctggccgccatcaccaaggcc

SEQ ID NO: 1360 - DNA, 51 bp, Artificial Sequence
  source: /note="Description of Artificial Sequence: Synthetic oligonucleotide"
ctgagagccgccttcaaggaggccaccaaggccgacgacatcaccaagacc

SEQ ID NO: 1361 - DNA, 51 bp, Artificial Sequence
  source: /note="Description of Artificial Sequence: Synthetic oligonucleotide"
ctggccatcctggccaaggcccacaccaagctggacgacgccaccaagacc

SEQ ID NO: 1362 - DNA, 51 bp, Artificial Sequence
  source: /note="Description of Artificial Sequence: Synthetic oligonucleotide"
accgtggatttcgccatcgccgacgccgtgaccgtggccatccccttcgcc

SEQ ID NO: 1363 - DNA, 51 bp, Artificial Sequence
  source: /note="Description of Artificial Sequence: Synthetic oligonucleotide"
gccgtggccttcaagatcagcgccaaggtggccgtgaagatccccttctcc

SEQ ID NO: 1364 - DNA, 51 bp, Artificial Sequence
  source: /note="Description of Artificial Sequence: Synthetic oligonucleotide"
accgccgatttcaaggccagcgacaaggccaccgccaagatccccttctcc

SEQ ID NO: 1365 - DNA, 51 bp, Artificial Sequence
  source: /note="Description of Artificial Sequence: Synthetic oligonucleotide"
accgtggatgccaagatcagcgacaaggtgaccgtgaaggccgccgcctcc

SEQ ID NO: 1366 - DNA, 51 bp, Artificial Sequence
  source: /note="Description of Artificial Sequence: Synthetic oligonucleotide"
aactatcccgccctggtgtacgccatggccgccgcctacgtggacaatatc

SEQ ID NO: 1367 - DNA, 51 bp, Artificial Sequence
  source: /note="Description of Artificial Sequence: Synthetic oligonucleotide"
aacgccccctccctggtggccaccatgagcagcaaggccgtggccaatatc

SEQ ID NO: 1368 - DNA, 51 bp, Artificial Sequence
  source: /note="Description of Artificial Sequence: Synthetic oligonucleotide"
gcctatccctccctggcctacaccatgagcagcaagtacgccgacgccatc

SEQ ID NO: 1369 - DNA, 51 bp, Artificial Sequence
  source: /note="Description of Artificial Sequence: Synthetic oligonucleotide"
aactatgcctccgccgtgtacaccgccagcagcaagtacgtggacaatgcc

SEQ ID NO: 1370 - DNA, 51 bp, Artificial Sequence
  source: /note="Description of Artificial Sequence: Synthetic oligonucleotide"
ggcaactacggcttcgccaacgccgacgccgatgcccccattctgggcgcc

SEQ ID NO: 1371 - DNA, 51 bp, Artificial Sequence
  source: /note="Description of Artificial Sequence: Synthetic oligonucleotide"
gccaactacgccttcagcaacaaggccaaggataagcccattctggccaag

SEQ ID NO: 1372 - DNA, 51 bp, Artificial Sequence
  source: /note="Description of Artificial Sequence: Synthetic oligonucleotide"
ggcgccgccggcttcagcgccaaggacaaggccaagcccattctgggcaag

SEQ ID NO: 1373 - DNA, 51 bp, Artificial Sequence
  source: /note="Description of Artificial Sequence: Synthetic oligonucleotide"
ggcaactacggcgccagcaacaaggacaaggataaggccgccgccggcaag

SEQ ID NO: 1374 - DNA, 51 bp, Artificial Sequence
  source: /note="Description of Artificial Sequence: Synthetic oligonucleotide"
atcgccgccatcgaggcccagcggatggagtttatcgccgaggtgctggcc

SEQ ID NO: 1375 - DNA, 51 bp, Artificial Sequence
  source: /note="Description of Artificial Sequence: Synthetic oligonucleotide"
atcgacgtgatcgagaaggcccgggccgagtttatcaaggaggccgccgga

SEQ ID NO: 1376 - DNA, 51 bp, Artificial Sequence
  source: /note="Description of Artificial Sequence: Synthetic oligonucleotide"
gccgacgtggccgagaagcagcggatggaggccgccaaggaggtgctggga

SEQ ID NO: 1377 - DNA, 51 bp, Artificial Sequence
  source: /note="Description of Artificial Sequence: Synthetic oligonucleotide"
atcgacgtgatcgccaagcaggccatggcctttatcaaggccgtgctggga

SEQ ID NO: 1378 - DNA, 51 bp, Artificial Sequence
  source: /note="Description of Artificial Sequence: Synthetic oligonucleotide"
ttcgaggcctacctgtttgacgatgccatcatcgacgccgccgccttcgcc

SEQ ID NO: 1379 - DNA, 51 bp, Artificial Sequence
  source: /note="Description of Artificial Sequence: Synthetic oligonucleotide"
ttcgagaaggccctgtttgccgccaagatcatcgccaagagcaagttcgcc

SEQ ID NO: 1380 - DNA, 51 bp, Artificial Sequence
  source: /note="Description of Artificial Sequence: Synthetic oligonucleotide"
gccgagaagtacgcctttgacgataaggccgccgacaagagcaagttcgcc

SEQ ID NO: 1381 - DNA, 51 bp, Artificial Sequence
  source: /note="Description of Artificial Sequence: Synthetic oligonucleotide"
ttcgccaagtacctggccgacgataagatcatcgacaagagcaaggccgtg

SEQ ID NO: 1382 - DNA, 51 bp, Artificial Sequence
  source: /note="Description of Artificial Sequence: Synthetic oligonucleotide"
gccgccgccgcccacatcgcctttgccgaaatcgccgaagaactggtggag

SEQ ID NO: 1383 - DNA, 51 bp, Artificial Sequence
  source: /note="Description of Artificial Sequence: Synthetic oligonucleotide"
gacaccgccaccgccgccagctttgccgaaatcgtggaagaagccgccgag

SEQ ID NO: 1384 - DNA, 51 bp, Artificial Sequence
  source: /note="Description of Artificial Sequence: Synthetic oligonucleotide"
gacaccgccacccacatcagcgccgccgccgccgtggccgaactggtggag

SEQ ID NO: 1385 - DNA, 51 bp, Artificial Sequence
  source: /note="Description of Artificial Sequence: Synthetic oligonucleotide"
gacaccgtgacccacatcagctttgtggaaatcgtggaagccctggtggcc

SEQ ID NO: 1386 - DNA, 27 bp, Artificial Sequence
  source: /note="Description of Artificial Sequence: Synthetic oligonucleotide"
gccgcctgggccgccgaccggctggcc

SEQ ID NO: 1387 - DNA, 27 bp, Artificial Sequence
  source: /note="Description of Artificial Sequence: Synthetic oligonucleotide"
aagggcgccgacaaggccgccgccacg

SEQ ID NO: 1388 - DNA, 51 bp, Artificial Sequence
  source: /note="Description of Artificial Sequence: Synthetic oligonucleotide"
ctggccgccctggccgccgcccggaacaaggccctgcacgccgagatcctg

SEQ ID NO: 1389 - DNA, 51 bp, Artificial Sequence
  source: /note="Description of Artificial Sequence: Synthetic oligonucleotide"
gccacgaaggccaaggatgcccggaacaaggccctgcacggcgaggccgcc

SEQ ID NO: 1390 - DNA, 51 bp, Artificial Sequence
  source: /note="Description of Artificial Sequence: Synthetic oligonucleotide"
ctgacgaagctgaaggatgtgcggaacaaggccctgcacggcgccatcctg

SEQ ID NO: 1391 - DNA, 51 bp, Artificial Sequence
  source: /note="Description of Artificial Sequence: Synthetic oligonucleotide"
accggcaccgccttcgacgagacagccgccctgatcaacgagctggccgcc

SEQ ID NO: 1392 - DNA, 51 bp, Artificial Sequence
  source: /note="Description of Artificial Sequence: Synthetic oligonucleotide"
gccgccgccagcttcgacgaggccaagtccctgatcaacgagctgaagaag

SEQ ID NO: 1393 - DNA, 51 bp, Artificial Sequence
  source: /note="Description of Artificial Sequence: Synthetic oligonucleotide"
accggcaccagcttcgccgagacaaagtccgccatcgccgaggccaagaag

SEQ ID NO: 1394 - DNA, 51 bp, Artificial Sequence
  source: /note="Description of Artificial Sequence: Synthetic oligonucleotide"
accggcaccagcgccgacgccacaaagtccctggccaacgccctgaagaag

SEQ ID NO: 1395 - protein, 17 aa, Artificial Sequence
  source: /note="Description of Artificial Sequence: Synthetic peptide"
AKRNDDTGQPRRNLFTY

SEQ ID NO: 1396 - protein, 17 aa, Artificial Sequence
  source: /note="Description of Artificial Sequence: Synthetic peptide"
FARNDDTGQPRRNLFTY

SEQ ID NO: 1397 - protein, 17 aa, Artificial Sequence
  source: /note="Description of Artificial Sequence: Synthetic peptide"
FKANDDTGQPRRNLFTY

SEQ ID NO: 1398 - protein, 17 aa, Artificial Sequence
  source: /note="Description of Artificial Sequence: Synthetic peptide"
FKRADDTGQPRRNLFTY

SEQ ID NO: 1399 - protein, 17 aa, Artificial Sequence
  source: /note="Description of Artificial Sequence: Synthetic peptide"
FKRNADTGQPRRNLFTY

SEQ ID NO: 1400 - protein, 17 aa, Artificial Sequence
  source: /note="Description of Artificial Sequence: Synthetic peptide"
FKRNDATGQPRRNLFTY

SEQ ID NO: 1401 - protein, 17 aa, Artificial Sequence
  source: /note="Description of Artificial Sequence: Synthetic peptide"
FKRNDDAGQPRRNLFTY

SEQ ID NO: 1402 - protein, 17 aa, Artificial Sequence
  source: /note="Description of Artificial Sequence: Synthetic peptide"
FKRNDDTAQPRRNLFTY

SEQ ID NO: 1403 - protein, 17 aa, Artificial Sequence
  source: /note="Description of Artificial Sequence: Synthetic peptide"
FKRNDDTGAPRRNLFTY

SEQ ID NO: 1404 - protein, 17 aa, Artificial Sequence
  source: /note="Description of Artificial Sequence: Synthetic peptide"
FKRNDDTGQARRNLFTY

SEQ ID NO: 1405 - protein, 17 aa, Artificial Sequence
  source: /note="Description of Artificial Sequence: Synthetic peptide"
FKRNDDTGQPARNLFTY

SEQ ID NO: 1406 - protein, 17 aa, Artificial Sequence
  source: /note="Description of Artificial Sequence: Synthetic peptide"
FKRNDDTGQPRANLFTY

SEQ ID NO: 1407 - protein, 17 aa, Artificial Sequence
  source: /note="Description of Artificial Sequence: Synthetic peptide"
FKRNDDTGQPRRALFTY

SEQ ID NO: 1408 - protein, 17 aa, Artificial Sequence
  source: /note="Description of Artificial Sequence: Synthetic peptide"
FKRNDDTGQPRRNAFTY

SEQ ID NO: 1409 - protein, 17 aa, Artificial Sequence
  source: /note="Description of Artificial Sequence: Synthetic peptide"
FKRNDDTGQPRRNLATY

SEQ ID NO: 1410 - protein, 17 aa, Artificial Sequence
  source: /note="Description of Artificial Sequence: Synthetic peptide"
FKRNDDTGQPRRNLFAY

SEQ ID NO: 1411 - protein, 17 aa, Artificial Sequence
  source: /note="Description of Artificial Sequence: Synthetic peptide"
FKRNDDTGQPRRNLFTA

SEQ ID NO: 1412 - protein, 17 aa, Artificial Sequence
  source: /note="Description of Artificial Sequence: Synthetic peptide"
ARILFKEHTKLDDITKT

SEQ ID NO: 1413 - protein, 17 aa, Artificial Sequence
  source: /note="Description of Artificial Sequence: Synthetic peptide"
LAILFKEHTKLDDITKT

SEQ ID NO: 1414 - protein, 17 aa, Artificial Sequence
  source: /note="Description of Artificial Sequence: Synthetic peptide"
LRALFKEHTKLDDITKT

SEQ ID NO: 1415 - protein, 17 aa, Artificial Sequence
  source: /note="Description of Artificial Sequence: Synthetic peptide"
LRIAFKEHTKLDDITKT

SEQ ID NO: 1416 - protein, 17 aa, Artificial Sequence
  source: /note="Description of Artificial Sequence: Synthetic peptide"
LRILAKEHTKLDDITKT

SEQ ID NO: 1417 - protein, 17 aa, Artificial Sequence
  source: /note="Description of Artificial Sequence: Synthetic peptide"
LRILFAEHTKLDDITKT

SEQ ID NO: 1418 - protein, 17 aa, Artificial Sequence
  source: /note="Description of Artificial Sequence: Synthetic peptide"
LRILFKAHTKLDDITKT

SEQ ID NO: 1419 - protein, 17 aa, Artificial Sequence
  source: /note="Description of Artificial Sequence: Synthetic peptide"
LRILFKEATKLDDITKT

SEQ ID NO: 1420 - protein, 17 aa, Artificial Sequence
  source: /note="Description of Artificial Sequence: Synthetic peptide"
LRILFKEHAKLDDITKT

SEQ ID NO: 1421 - protein, 17 aa, Artificial Sequence
  source: /note="Description of Artificial Sequence: Synthetic peptide"
LRILFKEHTALDDITKT

SEQ ID NO: 1422 - protein, 17 aa, Artificial Sequence
  source: /note="Description of Artificial Sequence: Synthetic peptide"
LRILFKEHTKADDITKT

SEQ ID NO: 1423 - protein, 17 aa, Artificial Sequence
  source: /note="Description of Artificial Sequence: Synthetic peptide"
LRILFKEHTKLADITKT

SEQ ID NO: 1424 - protein, 17 aa, Artificial Sequence
  source: /note="Description of Artificial Sequence: Synthetic peptide"
LRILFKEHTKLDAITKT

SEQ ID NO: 1425 - protein, 17 aa, Artificial Sequence
  source: /note="Description of Artificial Sequence: Synthetic peptide"
LRILFKEHTKLDDATKT

SEQ ID NO: 1426 - protein, 17 aa, Artificial Sequence
  source: /note="Description of Artificial Sequence: Synthetic peptide"
LRILFKEHTKLDDIAKT

SEQ ID NO: 1427 - protein, 17 aa, Artificial Sequence
  source: /note="Description of Artificial Sequence: Synthetic peptide"
LRILFKEHTKLDDITAT

SEQ ID NO: 1428 - protein, 17 aa, Artificial Sequence
  source: /note="Description of Artificial Sequence: Synthetic peptide"
LRILFKEHTKLDDITKA

SEQ ID NO: 1429 - protein, 17 aa, Artificial Sequence
  source: /note="Description of Artificial Sequence: Synthetic peptide"
AYPSLVYTMSSKYVDNI

SEQ ID NO: 1430 - protein, 17 aa, Artificial Sequence
  source: /note="Description of Artificial Sequence: Synthetic peptide"
NAPSLVYTMSSKYVDNI

SEQ ID NO: 1431 - protein, 17 aa, Artificial Sequence
  source: /note="Description of Artificial Sequence: Synthetic peptide"
NYASLVYTMSSKYVDNI

SEQ ID NO: 1432 - protein, 17 aa, Artificial Sequence
  source: /note="Description of Artificial Sequence: Synthetic peptide"
NYPALVYTMSSKYVDNI

SEQ ID NO: 1433 - protein, 17 aa, Artificial Sequence
  source: /note="Description of Artificial Sequence: Synthetic peptide"
NYPSAVYTMSSKYVDNI

SEQ ID NO: 1434 - protein, 17 aa, Artificial Sequence
  source: /note="Description of Artificial Sequence: Synthetic peptide"
NYPSLAYTMSSKYVDNI

SEQ ID NO: 1435 - protein, 17 aa, Artificial Sequence
  source: /note="Description of Artificial Sequence: Synthetic peptide"
NYPSLVATMSSKYVDNI

SEQ ID NO: 1436 - protein, 17 aa, Artificial Sequence
  source: /note="Description of Artificial Sequence: Synthetic peptide"
NYPSLVYAMSSKYVDNI

SEQ ID NO: 1437 - protein, 17 aa, Artificial Sequence
  source: /note="Description of Artificial Sequence: Synthetic peptide"
NYPSLVYTASSKYVDNI

SEQ ID NO: 1438 - protein, 17 aa, Artificial Sequence
  source: /note="Description of Artificial Sequence: Synthetic peptide"
NYPSLVYTMASKYVDNI

SEQ ID NO: 1439 - protein, 17 aa, Artificial Sequence
  source: /note="Description of Artificial Sequence: Synthetic peptide"
NYPSLVYTMSAKYVDNI

SEQ ID NO: 1440 - protein, 17 aa, Artificial Sequence
  source: /note="Description of Artificial Sequence: Synthetic peptide"
NYPSLVYTMSSAYVDNI

SEQ ID NO: 1441 - protein, 17 aa, Artificial Sequence
  source: /note="Description of Artificial Sequence: Synthetic peptide"
NYPSLVYTMSSKAVDNI

SEQ ID NO: 1442 - protein, 17 aa, Artificial Sequence
  source: /note="Description of Artificial Sequence: Synthetic peptide"
NYPSLVYTMSSKYADNI

SEQ ID NO: 1443 - protein, 17 aa, Artificial Sequence
  source: /note="Description of Artificial Sequence: Synthetic peptide"
NYPSLVYTMSSKYVANI

SEQ ID NO: 1444 - protein, 17 aa, Artificial Sequence
  source: /note="Description of Artificial Sequence: Synthetic peptide"
NYPSLVYTMSSKYVDAI

SEQ ID NO: 1445 - protein, 17 aa, Artificial Sequence
  source: /note="Description of Artificial Sequence: Synthetic peptide"
NYPSLVYTMSSKYVDNA

SEQ ID NO: 1446 - protein, 17 aa, Artificial Sequence
  source: /note="Description of Artificial Sequence: Synthetic peptide"
ATKLKDARNKALHGEIL

SEQ ID NO: 1447 - protein, 17 aa, Artificial Sequence
  source: /note="Description of Artificial Sequence: Synthetic peptide"
LAKLKDARNKALHGEIL

SEQ ID NO: 1448 - protein, 17 aa, Artificial Sequence
  source: /note="Description of Artificial Sequence: Synthetic peptide"
LTALKDARNKALHGEIL

SEQ ID NO: 1449 - protein, 17 aa, Artificial Sequence
  source: /note="Description of Artificial Sequence: Synthetic peptide"
LTKAKDARNKALHGEIL

SEQ ID NO: 1450 - protein, 17 aa, Artificial Sequence
  source: /note="Description of Artificial Sequence: Synthetic peptide"
LTKLADARNKALHGEIL

SEQ ID NO: 1451 - protein, 17 aa, Artificial Sequence
  source: /note="Description of Artificial Sequence: Synthetic peptide"
LTKLKAARNKALHGEIL

SEQ ID NO: 1452 - protein, 17 aa, Artificial Sequence
  source: /note="Description of Artificial Sequence: Synthetic peptide"
LTKLKDVRNKALHGEIL

SEQ ID NO: 1453 - protein, 17 aa, Artificial Sequence
  source: /note="Description of Artificial Sequence: Synthetic peptide"
LTKLKDARNAALHGEIL

SEQ ID NO: 1454 - protein, 17 aa, Artificial Sequence
  source: /note="Description of Artificial Sequence: Synthetic peptide"
LTKLKDARNKVLHGEIL

SEQ ID NO: 1455 - protein, 17 aa, Artificial Sequence
  source: /note="Description of Artificial Sequence: Synthetic peptide"
LTKLKDARNKAAHGEIL

SEQ ID NO: 1456 - protein, 17 aa, Artificial Sequence
  source: /note="Description of Artificial Sequence: Synthetic peptide"
LTKLKDARNKALHAEIL

SEQ ID NO: 1457 - protein, 17 aa, Artificial Sequence
  source: /note="Description of Artificial Sequence: Synthetic peptide"
LTKLKDARNKALHGAIL

SEQ ID NO: 1458 - protein, 17 aa, Artificial Sequence
  source: /note="Description of Artificial Sequence: Synthetic peptide"
LTKLKDARNKALHGEAL

SEQ ID NO: 1459 - protein, 17 aa, Artificial Sequence
  source: /note="Description of Artificial Sequence: Synthetic peptide"
LTKLKDARNKALHGEIA

SEQ ID NO: 1460 - protein, 17 aa, Artificial Sequence
  source: /note="Description of Artificial Sequence: Synthetic peptide"
FARNADAAQPRRNLFTY

SEQ ID NO: 1461 - protein, 17 aa, Artificial Sequence
  source: /note="Description of Artificial Sequence: Synthetic peptide"
FARNADAGQPRRNLFAY

SEQ ID NO: 1462 - protein, 17 aa, Artificial Sequence
  source: /note="Description of Artificial Sequence: Synthetic peptide"
FARNADTAQPRRNLFAY

SEQ ID NO: 1463 - protein, 17 aa, Artificial Sequence
  source: /note="Description of Artificial Sequence: Synthetic peptide"
FARNDDAAQPRRNLFAY

SEQ ID NO: 1464 - protein, 17 aa, Artificial Sequence
  source: /note="Description of Artificial Sequence: Synthetic peptide"
FKRNADAAQPRRNLFAY

SEQ ID NO: 1465 - protein, 17 aa, Artificial Sequence
  source: /note="Description of Artificial Sequence: Synthetic peptide"
FARNADAGQPRRNLFTY

SEQ ID NO: 1466 - protein, 17 aa, Artificial Sequence
  source: /note="Description of Artificial Sequence: Synthetic peptide"
FARNADTAQPRRNLFTY

SEQ ID NO: 1467 - protein, 17 aa, Artificial Sequence
  source: /note="Description of Artificial Sequence: Synthetic peptide"
FARNADTGQPRRNLFAY

SEQ ID NO: 1468 - protein, 17 aa, Artificial Sequence
  source: /note="Description of Artificial Sequence: Synthetic peptide"
FARNDDAAQPRRNLFTY

SEQ ID NO: 1469 - protein, 17 aa, Artificial Sequence
  source: /note="Description of Artificial Sequence: Synthetic peptide"
FARNDDAGQPRRNLFAY

SEQ ID NO: 1470 - protein, 17 aa, Artificial Sequence
  source: /note="Description of Artificial Sequence: Synthetic peptide"
FARNDDTAQPRRNLFAY

SEQ ID NO: 1471 - protein, 17 aa, Artificial Sequence
  source: /note="Description of Artificial Sequence: Synthetic peptide"
FKRNADAAQPRRNLFTY

SEQ ID NO: 1472 - protein, 17 aa, Artificial Sequence
  source: /note="Description of Artificial Sequence: Synthetic peptide"
FKRNADAGQPRRNLFAY

SEQ ID NO: 1473 - protein, 17 aa, Artificial Sequence
  source: /note="Description of Artificial Sequence: Synthetic peptide"
FKRNADTAQPRRNLFAY

SEQ ID NO: 1474 - protein, 17 aa, Artificial Sequence
  source: /note="Description of Artificial Sequence: Synthetic peptide"
FKRNDDAAQPRRNLFAY

SEQ ID NO: 1475 - protein, 17 aa, Artificial Sequence
  source: /note="Description of Artificial Sequence: Synthetic peptide"
FARNADTGQPRRNLFTY

SEQ ID NO: 1476 - protein, 17 aa, Artificial Sequence
  source: /note="Description of Artificial Sequence: Synthetic peptide"
FARNDDAGQPRRNLFTY

SEQ ID NO: 1477 - protein, 17 aa, Artificial Sequence
  source: /note="Description of Artificial Sequence: Synthetic peptide"
FARNDDTAQPRRNLFTY

SEQ ID NO: 1478 - protein, 17 aa, Artificial Sequence
  source: /note="Description of Artificial Sequence: Synthetic peptide"
FARNDDTGQPRRNLFAY

SEQ ID NO: 1479 - protein, 17 aa, Artificial Sequence
  source: /note="Description of Artificial Sequence: Synthetic peptide"
FKRNADAGQPRRNLFTY

SEQ ID NO: 1480 - protein, 17 aa, Artificial Sequence
  source: /note="Description of Artificial Sequence: Synthetic peptide"
FKRNADTAQPRRNLFTY

SEQ ID NO: 1481 - protein, 17 aa, Artificial Sequence
  source: /note="Description of Artificial Sequence: Synthetic peptide"
FKRNADTGQPRRNLFAY

SEQ ID NO: 1482 - protein, 17 aa, Artificial Sequence
  source: /note="Description of Artificial Sequence: Synthetic peptide"
FKRNDDAAQPRRNLFTY

SEQ ID NO: 1483 - protein, 17 aa, Artificial Sequence
  source: /note="Description of Artificial Sequence: Synthetic peptide"
FKRNDDAGQPRRNLFAY

SEQ ID NO: 1484 - protein, 17 aa, Artificial Sequence
  source: /note="Description of Artificial Sequence: Synthetic peptide"
FKRNDDTAQPRRNLFAY

SEQ ID NO: 1485 - protein, 17 aa, Artificial Sequence
  source: /note="Description of Artificial Sequence: Synthetic peptide"
FKANDDTGQAARNLFTY

SEQ ID NO: 1486 - protein, 17 aa, Artificial Sequence
  source: /note="Description of Artificial Sequence: Synthetic peptide"
FKANDDTGQARANLFTY

SEQ ID NO: 1487 - protein, 17 aa, Artificial Sequence
  source: /note="Description of Artificial Sequence: Synthetic peptide"
FKANDDTGQPAANLFTY

SEQ ID NO: 1488 - protein, 17 aa, Artificial Sequence
  source: /note="Description of Artificial Sequence: Synthetic peptide"
FKRNDDTGQAAANLFTY

SEQ ID NO: 1489 - protein, 17 aa, Artificial Sequence
  source: /note="Description of Artificial Sequence: Synthetic peptide"
FKANDDTGQARRNLFTY

SEQ ID NO: 1490 - protein, 17 aa, Artificial Sequence
  source: /note="Description of Artificial Sequence: Synthetic peptide"
FKANDDTGQPARNLFTY

SEQ ID NO: 1491 - protein, 17 aa, Artificial Sequence
  source: /note="Description of Artificial Sequence: Synthetic peptide"
FKANDDTGQPRANLFTY

SEQ ID NO: 1492 - protein, 17 aa, Artificial Sequence
  source: /note="Description of Artificial Sequence: Synthetic peptide"
FKRNDDTGQAARNLFTY

SEQ ID NO: 1493 - protein, 17 aa, Artificial Sequence
  source: /note="Description of Artificial Sequence: Synthetic peptide"
FKRNDDTGQARANLFTY

SEQ ID NO: 1494 - protein, 17 aa, Artificial Sequence
  source: /note="Description of Artificial Sequence: Synthetic peptide"
FKRNDDTGQPAANLFTY

SEQ ID NO: 1495 - protein, 17 aa, Artificial Sequence
  source: /note="Description of Artificial Sequence: Synthetic peptide"
NAPSLVATMSSKAVDNI

SEQ ID NO: 1496 - protein, 17 aa, Artificial Sequence
  source: /note="Description of Artificial Sequence: Synthetic peptide"
NAPSLVATMSSKYVANI

SEQ ID NO: 1497 - protein, 17 aa, Artificial Sequence
  source: /note="Description of Artificial Sequence: Synthetic peptide"
NAPSLVYTMSSKAVANI

SEQ ID NO: 1498 - protein, 17 aa, Artificial Sequence
  source: /note="Description of Artificial Sequence: Synthetic peptide"
NYPSLVATMSSKAVANI

SEQ ID NO: 1499 - protein, 17 aa, Artificial Sequence
  source: /note="Description of Artificial Sequence: Synthetic peptide"
NAPSLVATMSSKYVDNI

SEQ ID NO: 1500 - protein, 17 aa, Artificial Sequence
  source: /note="Description of Artificial Sequence: Synthetic peptide"
NAPSLVYTMSSKAVDNI

SEQ ID NO: 1501 - protein, 17 aa, Artificial Sequence
  source: /note="Description of Artificial Sequence: Synthetic peptide"
NAPSLVYTMSSKYVANI

SEQ ID NO: 1502 - protein, 17 aa, Artificial Sequence
  source: /note="Description of Artificial Sequence: Synthetic peptide"
NYPSLVATMSSKAVDNI

SEQ ID NO: 1503 - protein, 17 aa, Artificial Sequence
  source: /note="Description of Artificial Sequence: Synthetic peptide"
NYPSLVATMSSKYVANI

SEQ ID NO: 1504 - protein, 17 aa, Artificial Sequence
  source: /note="Description of Artificial Sequence: Synthetic peptide"
NYPSLVYTMSSKAVANI

SEQ ID NO: 1505 - protein, 17 aa, Artificial Sequence
  source: /note="Description of Artificial Sequence: Synthetic peptide"
NYASAVYTASSKYVDNI

SEQ ID NO: 1506 - protein, 17 aa, Artificial Sequence
  source: /note="Description of Artificial Sequence: Synthetic peptide"
NYASAVYTMSSKYVDNA

SEQ ID NO: 1507 - protein, 17 aa, Artificial Sequence
  source: /note="Description of Artificial Sequence: Synthetic peptide"
NYASLVYTASSKYVDNA

SEQ ID NO: 1508 - protein, 17 aa, Artificial Sequence
  source: /note="Description of Artificial Sequence: Synthetic peptide"
NYPSAVYTASSKYVDNA

SEQ ID NO: 1509 - protein, 17 aa, Artificial Sequence
  source: /note="Description of Artificial Sequence: Synthetic peptide"
NYASAVYTMSSKYVDNI

SEQ ID NO: 1510 - protein, 17 aa, Artificial Sequence
  source: /note="Description of Artificial Sequence: Synthetic peptide"
NYASLVYTASSKYVDNI

SEQ ID NO: 1511 - protein, 17 aa, Artificial Sequence
  source: /note="Description of Artificial Sequence: Synthetic peptide"
NYASLVYTMSSKYVDNA

SEQ ID NO: 1512 - protein, 17 aa, Artificial Sequence
  source: /note="Description of Artificial Sequence: Synthetic peptide"
NYPSAVYTASSKYVDNI

SEQ ID NO: 1513 - protein, 17 aa, Artificial Sequence
  source: /note="Description of Artificial Sequence: Synthetic peptide"
NYPSAVYTMSSKYVDNA

SEQ ID NO: 1514 - protein, 17 aa, Artificial Sequence
  source: /note="Description of Artificial Sequence: Synthetic peptide"
NYPSLVYTASSKYVDNA

SEQ ID NO: 1515 - DNA, 51 bp, Artificial Sequence
  source: /note="Description of Artificial Sequence: Synthetic oligonucleotide"
gccaagagaaacgacgacaccggccagcctcggagaaacctgttcacctac

SEQ ID NO: 1516 - DNA, 51 bp, Artificial Sequence
  source: /note="Description of Artificial Sequence: Synthetic oligonucleotide"
ttcgccagaaacgacgacaccggccagcctcggagaaacctgttcacctac

SEQ ID NO: 1517 - DNA, 51 bp, Artificial Sequence
  source: /note="Description of Artificial Sequence: Synthetic oligonucleotide"
ttcaaggccaacgacgacaccggccagcctcggagaaacctgttcacctac

SEQ ID NO: 1518 - DNA, 51 bp, Artificial Sequence
  source: /note="Description of Artificial Sequence: Synthetic oligonucleotide"
ttcaagagagccgacgacaccggccagcctcggagaaacctgttcacctac

SEQ ID NO: 1519 - DNA, 51 bp, Artificial Sequence
  source: /note="Description of Artificial Sequence: Synthetic oligonucleotide"
ttcaagagaaacgccgacaccggccagcctcggagaaacctgttcacctac

SEQ ID NO: 1520 - DNA, 51 bp, Artificial Sequence
  source: /note="Description of Artificial Sequence: Synthetic oligonucleotide"
ttcaagagaaacgacgccaccggccagcctcggagaaacctgttcacctac

SEQ ID NO: 1521 - DNA, 51 bp, Artificial Sequence
  source: /note="Description of Artificial Sequence: Synthetic oligonucleotide"
ttcaagagaaacgacgacgccggccagcctcggagaaacctgttcacctac

SEQ ID NO: 1522 - DNA, 51 bp, Artificial Sequence
  source: /note="Description of Artificial Sequence: Synthetic oligonucleotide"
ttcaagagaaacgacgacaccgcccagcctcggagaaacctgttcacctac

SEQ ID NO: 1523 - DNA, 51 bp, Artificial Sequence
  source: /note="Description of Artificial Sequence: Synthetic oligonucleotide"
ttcaagagaaacgacgacaccggcgcccctcggagaaacctgttcacctac

SEQ ID NO: 1524 - DNA, 51 bp, Artificial Sequence
  source: /note="Description of Artificial Sequence: Synthetic oligonucleotide"
ttcaagagaaacgacgacaccggccaggcccggagaaacctgttcacctac

SEQ ID NO: 1525 - DNA, 51 bp, Artificial Sequence
  source: /note="Description of Artificial Sequence: Synthetic oligonucleotide"
ttcaagagaaacgacgacaccggccagcctgccagaaacctgttcacctac

SEQ ID NO: 1526 - DNA, 51 bp, Artificial Sequence
  source: /note="Description of Artificial Sequence: Synthetic oligonucleotide"
ttcaagagaaacgacgacaccggccagcctcgggccaacctgttcacctac

SEQ ID NO: 1527 - DNA, 51 bp, Artificial Sequence
  source: /note="Description of Artificial Sequence: Synthetic oligonucleotide"
ttcaagagaaacgacgacaccggccagcctcggagagccctgttcacctac

SEQ ID NO: 1528 - DNA, 51 bp, Artificial Sequence
  source: /note="Description of Artificial Sequence: Synthetic oligonucleotide"
ttcaagagaaacgacgacaccggccagcctcggagaaacgccttcacctac

SEQ ID NO: 1529 - DNA, 51 bp, Artificial Sequence
  source: /note="Description of Artificial Sequence: Synthetic oligonucleotide"
ttcaagagaaacgacgacaccggccagcctcggagaaacctggccacctac

SEQ ID NO: 1530 - DNA, 51 bp, Artificial Sequence
  source: /note="Description of Artificial Sequence: Synthetic oligonucleotide"
ttcaagagaaacgacgacaccggccagcctcggagaaacctgttcgcctac

SEQ ID NO: 1531 - DNA, 51 bp, Artificial Sequence
  source: /note="Description of Artificial Sequence: Synthetic oligonucleotide"
ttcaagagaaacgacgacaccggccagcctcggagaaacctgttcaccgcc

SEQ ID NO: 1532 - DNA, 51 bp, Artificial Sequence
  source: /note="Description of Artificial Sequence: Synthetic oligonucleotide"
gccagaatcctgttcaaggagcacaccaagctggacgacatcaccaagacc

SEQ ID NO: 1533 - DNA, 51 bp, Artificial Sequence
  source: /note="Description of Artificial Sequence: Synthetic oligonucleotide"
ctggccatcctgttcaaggagcacaccaagctggacgacatcaccaagacc

SEQ ID NO: 1534 - DNA, 51 bp, Artificial Sequence
  source: /note="Description of Artificial Sequence: Synthetic oligonucleotide"
ctgagagccctgttcaaggagcacaccaagctggacgacatcaccaagacc

SEQ ID NO: 1535 - DNA, 51 bp, Artificial Sequence
  source: /note="Description of Artificial Sequence: Synthetic oligonucleotide"
ctgagaatcgccttcaaggagcacaccaagctggacgacatcaccaagacc

SEQ ID NO: 1536 - DNA, 51 bp, Artificial Sequence
  source: /note="Description of Artificial Sequence: Synthetic oligonucleotide"
ctgagaatcctggccaaggagcacaccaagctggacgacatcaccaagacc

SEQ ID NO: 1537 - DNA, 51 bp, Artificial Sequence
  source: /note="Description of Artificial Sequence: Synthetic oligonucleotide"
ctgagaatcctgttcgccgagcacaccaagctggacgacatcaccaagacc

SEQ ID NO: 1538 - DNA, 51 bp, Artificial Sequence
  source: /note="Description of Artificial Sequence: Synthetic oligonucleotide"
ctgagaatcctgttcaaggcccacaccaagctggacgacatcaccaagacc

SEQ ID NO: 1539 - DNA, 51 bp, Artificial Sequence
  source: /note="Description of Artificial Sequence: Synthetic oligonucleotide"
ctgagaatcctgttcaaggaggccaccaagctggacgacatcaccaagacc

SEQ ID NO: 1540 - DNA, 51 bp, Artificial Sequence
  source: /note="Description of Artificial Sequence: Synthetic oligonucleotide"
ctgagaatcctgttcaaggagcacgccaagctggacgacatcaccaagacc

SEQ ID NO: 1541 - DNA, 51 bp, Artificial Sequence
  source: /note="Description of Artificial Sequence: Synthetic oligonucleotide"
ctgagaatcctgttcaaggagcacaccgccctggacgacatcaccaagacc

SEQ ID NO: 1542 - DNA, 51 bp, Artificial Sequence
  source: /note="Description of Artificial Sequence: Synthetic oligonucleotide"
ctgagaatcctgttcaaggagcacaccaaggccgacgacatcaccaagacc

SEQ ID NO: 1543 - DNA, 51 bp, Artificial Sequence
  source: /note="Description of Artificial Sequence: Synthetic oligonucleotide"
ctgagaatcctgttcaaggagcacaccaagctggccgacatcaccaagacc

SEQ ID NO: 1544 - DNA, 51 bp, Artificial Sequence
  source: /note="Description of Artificial Sequence: Synthetic oligonucleotide"
ctgagaatcctgttcaaggagcacaccaagctggacgccatcaccaagacc

SEQ ID NO: 1545 - DNA, 51 bp, Artificial Sequence
  source: /note="Description of Artificial Sequence: Synthetic oligonucleotide"
ctgagaatcctgttcaaggagcacaccaagctggacgacgccaccaagacc

SEQ ID NO: 1546 - DNA, 51 bp, Artificial Sequence
  source: /note="Description of Artificial Sequence: Synthetic oligonucleotide"
ctgagaatcctgttcaaggagcacaccaagctggacgacatcgccaagacc

SEQ ID NO: 1547 - DNA, 51 bp, Artificial Sequence
  source: /note="Description of Artificial Sequence: Synthetic oligonucleotide"
ctgagaatcctgttcaaggagcacaccaagctggacgacatcaccgccacc

SEQ ID NO: 1548 - DNA, 51 bp, Artificial Sequence
  source: /note="Description of Artificial Sequence: Synthetic oligonucleotide"
ctgagaatcctgttcaaggagcacaccaagctggacgacatcaccaaggcc

SEQ ID NO: 1549 - DNA, 51 bp, Artificial Sequence
  source: /note="Description of Artificial Sequence: Synthetic oligonucleotide"
gcctatccctccctggtgtacaccatgagcagcaagtacgtggacaatatc

SEQ ID NO: 1550 - DNA, 51 bp, Artificial Sequence
  source: /note="Description of Artificial Sequence: Synthetic oligonucleotide"
aacgccccctccctggtgtacaccatgagcagcaagtacgtggacaatatc

SEQ ID NO: 1551 - DNA, 51 bp, Artificial Sequence
  source: /note="Description of Artificial Sequence: Synthetic oligonucleotide"
aactatgcctccctggtgtacaccatgagcagcaagtacgtggacaatatc

SEQ ID NO: 1552 - DNA, 51 bp, Artificial Sequence
  source: /note="Description of Artificial Sequence: Synthetic oligonucleotide"
aactatcccgccctggtgtacaccatgagcagcaagtacgtggacaatatc

SEQ ID NO: 1553 - DNA, 51 bp, Artificial Sequence
  source: /note="Description of Artificial Sequence: Synthetic oligonucleotide"
aactatccctccgccgtgtacaccatgagcagcaagtacgtggacaatatc

SEQ ID NO: 1554 - DNA, 51 bp, Artificial Sequence
  source: /note="Description of Artificial Sequence: Synthetic oligonucleotide"
aactatccctccctggcctacaccatgagcagcaagtacgtggacaatatc

SEQ ID NO: 1555 - DNA, 51 bp, Artificial Sequence
  source: /note="Description of Artificial Sequence: Synthetic oligonucleotide"
aactatccctccctggtggccaccatgagcagcaagtacgtggacaatatc

SEQ ID NO: 1556 - DNA, 51 bp, Artificial Sequence
  source: /note="Description of Artificial Sequence: Synthetic oligonucleotide"
aactatccctccctggtgtacgccatgagcagcaagtacgtggacaatatc

SEQ ID NO: 1557 - DNA, 51 bp, Artificial Sequence
  source: /note="Description of Artificial Sequence: Synthetic oligonucleotide"
aactatccctccctggtgtacaccgccagcagcaagtacgtggacaatatc

SEQ ID NO: 1558 - DNA, 51 bp, Artificial Sequence
  source: /note="Description of Artificial Sequence: Synthetic oligonucleotide"
aactatccctccctggtgtacaccatggccagcaagtacgtggacaatatc

SEQ ID NO: 1559 - DNA, 51 bp, Artificial Sequence
  source: /note="Description of Artificial Sequence: Synthetic oligonucleotide"
aactatccctccctggtgtacaccatgagcgccaagtacgtggacaatatc

SEQ ID NO: 1560 - DNA, 51 bp, Artificial Sequence
  source: /note="Description of Artificial Sequence: Synthetic oligonucleotide"
aactatccctccctggtgtacaccatgagcagcgcctacgtggacaatatc

SEQ ID NO: 1561 - DNA, 51 bp, Artificial Sequence
  source: /note="Description of Artificial Sequence: Synthetic oligonucleotide"
aactatccctccctggtgtacaccatgagcagcaaggccgtggacaatatc

SEQ ID NO: 1562 - DNA, 51 bp, Artificial Sequence
  source: /note="Description of Artificial Sequence: Synthetic oligonucleotide"
aactatccctccctggtgtacaccatgagcagcaagtacgccgacaatatc

SEQ ID NO: 1563 - DNA, 51 bp, Artificial Sequence
  source: /note="Description of Artificial Sequence: Synthetic oligonucleotide"
aactatccctccctggtgtacaccatgagcagcaagtacgtggccaatatc

SEQ ID NO: 1564 - DNA, 51 bp, Artificial Sequence
  source: /note="Description of Artificial Sequence: Synthetic oligonucleotide"
aactatccctccctggtgtacaccatgagcagcaagtacgtggacgccatc

SEQ ID NO: 1565 - DNA, 51 bp, Artificial Sequence
  source: /note="Description of Artificial Sequence: Synthetic oligonucleotide"
aactatccctccctggtgtacaccatgagcagcaagtacgtggacaatgcc

SEQ ID NO: 1566 - DNA, 51 bp, Artificial Sequence
  source: /note="Description of Artificial Sequence: Synthetic oligonucleotide"
gccacgaagctgaaggatgcccggaacaaggccctgcacggcgagatcctg

SEQ ID NO: 1567 - DNA, 51 bp, Artificial Sequence
  source: /note="Description of Artificial Sequence: Synthetic oligonucleotide"
ctggccaagctgaaggatgcccggaacaaggccctgcacggcgagatcctg

SEQ ID NO: 1568 - DNA, 51 bp, Artificial Sequence
  source: /note="Description of Artificial Sequence: Synthetic oligonucleotide"
ctgacggccctgaaggatgcccggaacaaggccctgcacggcgagatcctg

SEQ ID NO: 1569 - DNA, 51 bp, Artificial Sequence
  source: /note="Description of Artificial Sequence: Synthetic oligonucleotide"
ctgacgaaggccaaggatgcccggaacaaggccctgcacggcgagatcctg

SEQ ID NO: 1570 - DNA, 51 bp, Artificial Sequence
  source: /note="Description of Artificial Sequence: Synthetic oligonucleotide"
ctgacgaagctggccgatgcccggaacaaggccctgcacggcgagatcctg

SEQ ID NO: 1571 - DNA, 51 bp, Artificial Sequence
  source: /note="Description of Artificial Sequence: Synthetic oligonucleotide"
ctgacgaagctgaaggccgcccggaacaaggccctgcacggcgagatcctg

SEQ ID NO: 1572 - DNA, 51 bp, Artificial Sequence
  source: /note="Description of Artificial Sequence: Synthetic oligonucleotide"
ctgacgaagctgaaggatgtgcggaacaaggccctgcacggcgagatcctg

SEQ ID NO: 1573 - DNA, 51 bp, Artificial Sequence
  source: /note="Description of Artificial Sequence: Synthetic oligonucleotide"
ctgacgaagctgaaggatgcccggaacgccgccctgcacggcgagatcctg

SEQ ID NO: 1574 - DNA, 51 bp, Artificial Sequence
  source: /note="Description of Artificial Sequence: Synthetic oligonucleotide"
ctgacgaagctgaaggatgcccggaacaaggtgctgcacggcgagatcctg

SEQ ID NO: 1575 - DNA, 51 bp, Artificial Sequence
  source: /note="Description of Artificial Sequence: Synthetic oligonucleotide"
ctgacgaagctgaaggatgcccggaacaaggccgcccacggcgagatcctg

SEQ ID NO: 1576 - DNA, 51 bp, Artificial Sequence
  source: /note="Description of Artificial Sequence: Synthetic oligonucleotide"
ctgacgaagctgaaggatgcccggaacaaggccctgcacgccgagatcctg

SEQ ID NO: 1577 - DNA, 51 bp, Artificial Sequence
  source: /note="Description of Artificial Sequence: Synthetic oligonucleotide"
ctgacgaagctgaaggatgcccggaacaaggccctgcacggcgccatcctg

SEQ ID NO: 1578 - DNA, 51 bp, Artificial Sequence
  source: /note="Description of Artificial Sequence: Synthetic oligonucleotide"
ctgacgaagctgaaggatgcccggaacaaggccctgcacggcgaggccctg

SEQ ID NO: 1579 - DNA, 51 bp, Artificial Sequence
  source: /note="Description of Artificial Sequence: Synthetic oligonucleotide"
ctgacgaagctgaaggatgcccggaacaaggccctgcacggcgagatcgcc

SEQ ID NO: 1580 - DNA, 51 bp, Artificial Sequence
  source: /note="Description of Artificial Sequence: Synthetic oligonucleotide"
ttcgccagaaacgccgacgccgcccagcctcggagaaacctgttcacctac

SEQ ID NO: 1581 - DNA, 51 bp, Artificial Sequence
  source: /note="Description of Artificial Sequence: Synthetic oligonucleotide"
ttcgccagaaacgccgacgccggccagcctcggagaaacctgttcgcctac

SEQ ID NO: 1582 - DNA, 51 bp, Artificial Sequence
  source: /note="Description of Artificial Sequence: Synthetic oligonucleotide"
ttcgccagaaacgccgacaccgcccagcctcggagaaacctgttcgcctac

SEQ ID NO: 1583 - DNA, 51 bp, Artificial Sequence
  source: /note="Description of Artificial Sequence: Synthetic oligonucleotide"
ttcgccagaaacgacgacgccgcccagcctcggagaaacctgttcgcctac

SEQ ID NO: 1584 - DNA, 51 bp, Artificial Sequence
  source: /note="Description of Artificial Sequence: Synthetic oligonucleotide"
ttcaagagaaacgccgacgccgcccagcctcggagaaacctgttcgcctac

SEQ ID NO: 1585 - DNA, 51 bp, Artificial Sequence
  source: /note="Description of Artificial Sequence: Synthetic oligonucleotide"
ttcgccagaaacgccgacgccggccagcctcggagaaacctgttcacctac

SEQ ID NO: 1586 - DNA, 51 bp, Artificial Sequence
  source: /note="Description of Artificial Sequence: Synthetic oligonucleotide"
ttcgccagaaacgccgacaccgcccagcctcggagaaacctgttcacctac

SEQ ID NO: 1587 - DNA, 51 bp, Artificial Sequence
  source: /note="Description of Artificial Sequence: Synthetic oligonucleotide"
ttcgccagaaacgccgacaccggccagcctcggagaaacctgttcgcctac

SEQ ID NO: 1588 - DNA, 51 bp, Artificial Sequence
  source: /note="Description of Artificial Sequence: Synthetic oligonucleotide"
ttcgccagaaacgacgacgccgcccagcctcggagaaacctgttcacctac

SEQ ID NO: 1589 - DNA, 51 bp, Artificial Sequence
  source: /note="Description of Artificial Sequence: Synthetic oligonucleotide"
ttcgccagaaacgacgacgccggccagcctcggagaaacctgttcgcctac

SEQ ID NO: 1590 - DNA, 51 bp, Artificial Sequence
  source: /note="Description of Artificial Sequence: Synthetic oligonucleotide"
ttcgccagaaacgacgacaccgcccagcctcggagaaacctgttcgcctac

SEQ ID NO: 1591 - DNA, 51 bp, Artificial Sequence
  source: /note="Description of Artificial Sequence: Synthetic oligonucleotide"
ttcaagagaaacgccgacgccgcccagcctcggagaaacctgttcacctac

SEQ ID NO: 1592 - DNA, 51 bp, Artificial Sequence
  source: /note="Description of Artificial Sequence: Synthetic oligonucleotide"
ttcaagagaaacgccgacgccggccagcctcggagaaacctgttcgcctac

SEQ ID NO: 1593 - DNA, 51 bp, Artificial Sequence
  source: /note="Description of Artificial Sequence: Synthetic oligonucleotide"
ttcaagagaaacgccgacaccgcccagcctcggagaaacctgttcgcctac

SEQ ID NO: 1594 - DNA, 51 bp, Artificial Sequence
  source: /note="Description of Artificial Sequence: Synthetic oligonucleotide"
ttcaagagaaacgacgacgccgcccagcctcggagaaacctgttcgcctac

SEQ ID NO: 1595 - DNA, 51 bp, Artificial Sequence
  source: /note="Description of Artificial Sequence: Synthetic oligonucleotide"
ttcgccagaaacgccgacaccggccagcctcggagaaacctgttcacctac

SEQ ID NO: 1596 - DNA, 51 bp, Artificial Sequence
  source: /note="Description of Artificial Sequence: Synthetic oligonucleotide"
ttcgccagaaacgacgacgccggccagcctcggagaaacctgttcacctac

SEQ ID NO: 1597 - DNA, 51 bp, Artificial Sequence
  source: /note="Description of Artificial Sequence: Synthetic oligonucleotide"
ttcgccagaaacgacgacaccgcccagcctcggagaaacctgttcacctac

SEQ ID NO: 1598 - DNA, 51 bp, Artificial Sequence
  source: /note="Description of Artificial Sequence: Synthetic oligonucleotide"
ttcgccagaaacgacgacaccggccagcctcggagaaacctgttcgcctac

SEQ ID NO: 1599 - DNA, 51 bp, Artificial Sequence
  source: /note="Description of Artificial Sequence: Synthetic oligonucleotide"
ttcaagagaaacgccgacgccggccagcctcggagaaacctgttcacctac

SEQ ID NO: 1600 - DNA, 51 bp, Artificial Sequence
  source: /note="Description of Artificial Sequence: Synthetic oligonucleotide"
ttcaagagaaacgccgacaccgcccagcctcggagaaacctgttcacctac

SEQ ID NO: 1601 - DNA, 51 bp, Artificial Sequence
  source: /note="Description of Artificial Sequence: Synthetic oligonucleotide"
ttcaagagaaacgccgacaccggccagcctcggagaaacctgttcgcctac

SEQ ID NO: 1602 - DNA, 51 bp, Artificial Sequence
  source: /note="Description of Artificial Sequence: Synthetic oligonucleotide"
ttcaagagaaacgacgacgccgcccagcctcggagaaacctgttcacctac

SEQ ID NO: 1603 - DNA, 51 bp, Artificial Sequence
  source: /note="Description of Artificial Sequence: Synthetic oligonucleotide"
ttcaagagaaacgacgacgccggccagcctcggagaaacctgttcgcctac

SEQ ID NO: 1604 - DNA, 51 bp, Artificial Sequence
  source: /note="Description of Artificial Sequence: Synthetic oligonucleotide"
ttcaagagaaacgacgacaccgcccagcctcggagaaacctgttcgcctac

SEQ ID NO: 1605 - DNA, 51 bp, Artificial Sequence
  source: /note="Description of Artificial Sequence: Synthetic oligonucleotide"
ttcaaggccaacgacgacaccggccaggccgccagaaacctgttcacctac

SEQ ID NO: 1606 - DNA, 51 bp, Artificial Sequence
  source: /note="Description of Artificial Sequence: Synthetic oligonucleotide"
ttcaaggccaacgacgacaccggccaggcccgggccaacctgttcacctac

SEQ ID NO: 1607 - DNA, 51 bp, Artificial Sequence
  source: /note="Description of Artificial Sequence: Synthetic oligonucleotide"
ttcaaggccaacgacgacaccggccagcctgccgccaacctgttcacctac

SEQ ID NO: 1608 - DNA, 51 bp, Artificial Sequence
  source: /note="Description of Artificial Sequence: Synthetic oligonucleotide"
ttcaagagaaacgacgacaccggccaggccgccgccaacctgttcacctac

SEQ ID NO: 1609 - DNA, 51 bp, Artificial Sequence
  source: /note="Description of Artificial Sequence: Synthetic oligonucleotide"
ttcaaggccaacgacgacaccggccaggcccggagaaacctgttcacctac

SEQ ID NO: 1610 - DNA, 51 bp, Artificial Sequence
  source: /note="Description of Artificial Sequence: Synthetic oligonucleotide"
ttcaaggccaacgacgacaccggccagcctgccagaaacctgttcacctac

SEQ ID NO: 1611 - DNA, 51 bp, Artificial Sequence
  source: /note="Description of Artificial Sequence: Synthetic oligonucleotide"
ttcaaggccaacgacgacaccggccagcctcgggccaacctgttcacctac

SEQ ID NO: 1612 - DNA, 51 bp, Artificial Sequence
  source: /note="Description of Artificial Sequence: Synthetic oligonucleotide"
ttcaagagaaacgacgacaccggccaggccgccagaaacctgttcacctac

SEQ ID NO: 1613 - DNA, 51 bp, Artificial Sequence
  source: /note="Description of Artificial Sequence: Synthetic oligonucleotide"
ttcaagagaaacgacgacaccggccaggcccgggccaacctgttcacctac

SEQ ID NO: 1614 - DNA, 51 bp, Artificial Sequence
  source: /note="Description of Artificial Sequence: Synthetic oligonucleotide"
ttcaagagaaacgacgacaccggccagcctgccgccaacctgttcacctac

SEQ ID NO: 1615 - DNA, 51 bp, Artificial Sequence
  source: /note="Description of Artificial Sequence: Synthetic oligonucleotide"
aacgccccctccctggtggccaccatgagcagcaaggccgtggacaatatc

SEQ ID NO: 1616 - DNA, 51 bp, Artificial Sequence
  source: /note="Description of Artificial Sequence: Synthetic oligonucleotide"
aacgccccctccctggtggccaccatgagcagcaagtacgtggccaatatc

SEQ ID NO: 1617 - DNA, 51 bp, Artificial Sequence
  source: /note="Description of Artificial Sequence: Synthetic oligonucleotide"
aacgccccctccctggtgtacaccatgagcagcaaggccgtggccaatatc

SEQ ID NO: 1618 - DNA, 51 bp, Artificial Sequence
  source: /note="Description of Artificial Sequence: Synthetic oligonucleotide"
aactatccctccctggtggccaccatgagcagcaaggccgtggccaatatc

SEQ ID NO: 1619 - DNA, 51 bp, Artificial Sequence
  source: /note="Description of Artificial Sequence: Synthetic oligonucleotide"
aacgccccctccctggtggccaccatgagcagcaagtacgtggacaatatc

SEQ ID NO: 1620 - DNA, 51 bp, Artificial Sequence
  source: /note="Description of Artificial Sequence: Synthetic oligonucleotide"
aacgccccctccctggtgtacaccatgagcagcaaggccgtggacaatatc

SEQ ID NO: 1621 - DNA, 51 bp, Artificial Sequence
  source: /note="Description of Artificial Sequence: Synthetic oligonucleotide"
aacgccccctccctggtgtacaccatgagcagcaagtacgtggccaatatc

SEQ ID NO: 1622 - DNA, 51 bp, Artificial Sequence
  source: /note="Description of Artificial Sequence: Synthetic oligonucleotide"
aactatccctccctggtggccaccatgagcagcaaggccgtggacaatatc

SEQ ID NO: 1623 - DNA, 51 bp, Artificial Sequence
  source: /note="Description of Artificial Sequence: Synthetic oligonucleotide"
aactatccctccctggtggccaccatgagcagcaagtacgtggccaatatc

SEQ ID NO: 1624 - DNA, 51 bp, Artificial Sequence
  source: /note="Description of Artificial Sequence: Synthetic oligonucleotide"
aactatccctccctggtgtacaccatgagcagcaaggccgtggccaatatc

SEQ ID NO: 1625 - DNA, 51 bp, Artificial Sequence
  source: /note="Description of Artificial Sequence: Synthetic oligonucleotide"
aactatgcctccgccgtgtacaccgccagcagcaagtacgtggacaatatc

SEQ ID NO: 1626 - DNA, 51 bp, Artificial Sequence
  source: /note="Description of Artificial Sequence: Synthetic oligonucleotide"
aactatgcctccgccgtgtacaccatgagcagcaagtacgtggacaatgcc

SEQ ID NO: 1627 - DNA, 51 bp, Artificial Sequence
  source: /note="Description of Artificial Sequence: Synthetic oligonucleotide"
aactatgcctccctggtgtacaccgccagcagcaagtacgtggacaatgcc

SEQ ID NO: 1628 - DNA, 51 bp, Artificial Sequence
  source: /note="Description of Artificial Sequence: Synthetic oligonucleotide"
aactatccctccgccgtgtacaccgccagcagcaagtacgtggacaatgcc

SEQ ID NO: 1629 - DNA, 51 bp, Artificial Sequence
  source: /note="Description of Artificial Sequence: Synthetic oligonucleotide"
aactatgcctccgccgtgtacaccatgagcagcaagtacgtggacaatatc

SEQ ID NO: 1630 - DNA, 51 bp, Artificial Sequence
  source: /note="Description of Artificial Sequence: Synthetic oligonucleotide"
aactatgcctccctggtgtacaccgccagcagcaagtacgtggacaatatc

SEQ ID NO: 1631 - DNA, 51 bp, Artificial Sequence
  source: /note="Description of Artificial Sequence: Synthetic oligonucleotide"
aactatgcctccctggtgtacaccatgagcagcaagtacgtggacaatgcc

SEQ ID NO: 1632 - DNA, 51 bp, Artificial Sequence
  source: /note="Description of Artificial Sequence: Synthetic oligonucleotide"
aactatccctccgccgtgtacaccgccagcagcaagtacgtggacaatatc

SEQ ID NO: 1633 - DNA, 51 bp, Artificial Sequence
  source: /note="Description of Artificial Sequence: Synthetic oligonucleotide"
aactatccctccgccgtgtacaccatgagcagcaagtacgtggacaatgcc

SEQ ID NO: 1634 - DNA, 51 bp, Artificial Sequence
  source: /note="Description of Artificial Sequence: Synthetic oligonucleotide"
aactatccctccctggtgtacaccgccagcagcaagtacgtggacaatgcc

SEQ ID NO: 1635 - protein, 790 aa, Artificial Sequence
  source: /note="Description of Artificial Sequence: Synthetic polypeptide"
MNGIELKKEEAAFYFNQAELNLKAIEDNIFDKERRKTLLNNPQILAKMENFIFNFRDVTKNAKGEIDCLLLKLRELRNFYSHYVHKRDVRELSKGEKPILEKYYQFAIESTGSENVKLEIIENDAWLADAGVLFFLCIFLKKSQANKLISGISGFKRNDDTGQPRRNLFTYFSIREGYKVVPEMQKHFLLFSLVNHLSNQDDYIEKAHQPYDIGEGLFFHRIASTFLNISGILRNMKFYTYQSKRLVEQRGELKREKDIFAWEEPFQGNSYFEINGHKGVIGEDELKELCYAFLIGNQDANKVEGRITQFLEKFRNANSVQQVKDDEMLKPEYFPANYFAESGVGRIKDRVLNRLNKAIKSNKAKKGEIIAYDKMREVMAFINNSLPVDEKLKPKDYKRYLGMVRFWDREKDNIKREFETKEWSKYLPSNFWTAKNLERVYGLAREKNAELFNKLKADVEKMDERELEKYQKINDAKDLANLRRLASDFGVKWEEKDWDEYSGQIKKQITDSQKLTIMKQRITAGLKKKHGIENLNLRITIDINKSRKAVLNRIAIPRGFVKRHILGWQESEKVSKKIREAECEILLSKEYEELSKQFFQSKDYDKMTRINGLYEKNKLIALMAVYLMGQLRILFKEHTKLDDITKTTVDFKISDKVTVKIPFSNAPSLVYTMSSKAVDNIGNYGFSNKDKDKPILGKIDVIEKQRMEFIKEVLGFEKYLFDDKIIDKSKFADTATHISFAEIVEELVEKGWDKDRLTKLKDARNKALHGEILTGTSFDETKSLINELKK

1. An engineered Clustered Regularly Interspaced Short Palindromic Repeat (CRISPR)-Cas13 effector enzyme, wherein the engineered Cas13:
(1) comprises a mutation in a region spatially close to an endonuclease catalytic domain (e.g., a HEPN domain) of the corresponding wild-type Cas13 effector enzyme;
(2) substantially preserves (e.g., retains at least 50%, 60%, 70%, 72.5%, 75%, 80%, 85%, 87.5%, 90%, 95%, 96%, 97%, 97.5%, 98%, 99% or more of) guide sequence-specific endonuclease cleavage activity of the wild-type Cas13 towards a target RNA complementary to the guide sequence; and,
(3) substantially lacks (e.g., retains less than 50%, 40%, 35%, 30%, 27.5%, 25%, 22.5%, 20%, 17.5%, 15%, 12.5%, 10%, 7.5%, 5%, 4%, 3%, 2.5%, 2%, 1% or less of) guide sequence-independent collateral endonuclease cleavage activity of the wild-type Cas13 towards a non-target RNA that does not bind to the guide sequence.

2. The engineered Cas13 of claim 1, wherein the Cas13 is a Cas13e, a Cas13f, a Cas13d (including CasRx), a Cas13a, a Cas13b, or a Cas13c.

3. The engineered Cas13 of claim 2, wherein the Cas13e has the amino acid sequence of SEQ ID NO: 4, and/or wherein the Cas13f has the amino acid sequence of SEQ ID NO: 52, and/or wherein the Cas13d has the amino acid sequence of SEQ ID NO: 101.

4. The engineered Cas13 of any one of claims 1-3, wherein the region includes residues within 130, 125, 120, 110, 100, 90, 80, 70, 60, 50, 40, 30, 20, or 10 amino acids from any residues of the endonuclease catalytic domain (e.g., an RXXXXH domain) in the primary sequence of the Cas13e; residues within 170, 160, 150, 140, 130, 120, 110, 100, 90, 80, 70, 60, 50,40, 30, 20, or 10 amino acids from any residues of the endonuclease catalytic domain (e.g., an RXXXXH domain) in the primary sequence of the Cas13d; or residues within 140, 130, 120, 110, 100, 90, 80, 70, 60, 50, 40, 30, 20, or 10 amino acids from any residues of the endonuclease catalytic domain (e.g., an RXXXXH domain) in the primary sequence of the Cas13f.

5. The engineered Cas13 of any one of claims 1-3, wherein the region includes residues more than 100, 110, 120, or 130 residues away from any residues of the endonuclease catalytic domain in the primary sequence of the Cas13, but are spatially within 1-10 or 5 Ångström of a residue of the endonuclease catalytic domain.

6. The engineered Cas13 of any one of claims 1-5, wherein the endonuclease catalytic domain is a HEPN domain, optionally a HEPN domain comprising an RXXXXH motif.

7. The engineered Cas13 of claim 6, wherein the RXXXXH motif comprises a R{N/H/K/Q/R}X₁X₂X₃H sequence (SEQ ID NO: 1024).

8. The engineered Cas13 of claim 7, wherein in the R{N/H/K/Q/R}X₁X₂X₃H sequence (SEQ ID NO: 1025), X₁ is R, S, D, E, Q, N, G, or Y; X₂ is I, S, T, V, or L; and X₃ is L, F, N, Y, V, I, S, D, E, or A.

9. The engineered Cas13 of claim 6, wherein the RXXXXH motif is an N-terminal RXXXXH motif comprising an RNXXXH sequence, such as an RN{Y/F}{F/Y}SH sequence (SEQ ID NO: 64).

10. The engineered Cas13 of claim 9, wherein the N-terminal RXXXXH motif has a RNYFSH sequence (SEQ ID NO: 65).

11. The engineered Cas13 of claim 9, wherein the N-terminal RXXXXH motif has a RNFYSH sequence (SEQ ID NO: 66).

12. The engineered Cas13 of claim 9, wherein the RXXXXH motif is a C-terminal RXXXXH motif comprising an R{N/A/R}{A/K/S/F}{A/L/F}{F/H/L}H sequence (SEQ ID NO: 1026).

13. The engineered Cas13 of claim 12, wherein the C-terminal RXXXXH motif has a RN(A/K)ALH sequence (SEQ ID NO: 67).

14. The engineered Cas13 of claim 12, wherein the C-terminal RXXXXH motif has a RAFFHH (SEQ ID NO: 68) or RRAFFH sequence (SEQ ID NO: 69).

15. The engineered Cas13 of any one of claims 1-14, wherein said region comprises, consists essentially of, or consists of:
(i) residues corresponding to residues between residues 1-194, 2-187, 227-242, 620-775, or 634-755 of SEQ ID NO: 4;
(ii) residues corresponding to the HEPN1-1 domain (e.g., residues 90-292), Helical2 domain (e.g., residues 536-690), and the HEPN2 domain (e.g., residues 690-967) of SEQ ID NO: 101; or,
(iii) residues corresponding to the HEPN1 domain (e.g., residues 1-168), Helical1 domain, Helical2 domain (e.g., residues 346-477), and the HEPN2 domain (e.g., residues 644-790) of SEQ ID NO: 52.

16. The engineered Cas13 of any one of claims 1-15, wherein said region comprises, consists essentially of, or consists of residues corresponding to residues between residues 35-51, 52-67, 156-171, 666-682, or 712-727 of SEQ ID NO: 4.

17. The engineered Cas13 of any one of claims 1-16, wherein said mutation comprises, consists essentially of, or consists of substitutions, within a stretch of 15-20 consecutive amino acids within the region, (a) one or more charged, nitrogen-containing side chain group, bulky (such as F or Y), aliphatic, and/or polar residues to a charge-neutral short chain aliphatic residue (such as A, V, or I); (b) one or more I/L to A substitution(s); and/or (c) one or more A to V substitution(s).

18. The engineered Cas13 of claim 17, wherein said stretch is about 16 or 17 residues.

19. The engineered Cas13 of claim 17 or 18, wherein substantially all, except for up to 1, 2, or 3, charged and polar residues within the stretch are substituted.

20. The engineered Cas13 of any one of claims 17-19, wherein a total of about 7, 8, 9, or 10 charged and polar residues within the stretch are substituted.

21. The engineered Cas13 of any one of claims 17-20, wherein the N- and C-terminal 2 residues of the stretch are substituted to amino acids the coding sequences of which contain a restriction enzyme recognition sequence.

22. The engineered Cas13 of claim 21, wherein the N-terminal two residues are VF, and the C-terminal 2 residues are ED, and the restriction enzyme is BpiI.

23. The engineered Cas13 of any one of claims 17-22, wherein the one or more charged or polar residues comprise N, Q, R, K, H, D, E, Y, S, and T residues.

24. The engineered Cas13 of claim 23, wherein the one or more charged or polar residues comprise R, K, H, N, Y, and/or Q residues.

25. The engineered Cas13 of claim 17 or 18, wherein one or more Y residue(s) within said stretch is substituted.

26. The engineered Cas13 of claim 25, wherein said one or more Y residues(s) correspond to Y672, Y676, and/or Y715 of wild-type Cas13e.1 (SEQ ID NO: 4).

27. The engineered Cas13 of claim 25, wherein said stretch is residues 35-51, 52-67, 156-171, 666-682, or 712-727 of SEQ ID NO: 4.

28. The engineered Cas13 of claim 17 or 18, wherein the mutation comprises Ala substitution(s) corresponding to any one or more of SEQ ID NOs: 37-39, 45, and 48.

29. The engineered Cas13 of any one of claims 17-28, wherein the charge-neutral short chain aliphatic residue is Ala (A).

30. The engineered Cas13 of any one of claims 17-29, wherein said mutation comprises, consists essentially of, or consists of:
(a) substitutions within 1, 2, 3, 4, or 5 of said stretches of 15-20 consecutive amino acids within the region;
(b) a mutation corresponds to a Cas13d mutation (e.g., that of Example 4) that retains at least about 75% of guide RNA-specific cleavage of wild-type Cas13d (such as SEQ ID NO: 101), and exhibits less than about 27.5% collateral effect of wild-type Cas13d (such as SEQ ID NO: 101);
(c) a mutation corresponds to the N1V7, N2V7, N2V8 (cfCas13d), N3V7, or N15V4 mutation of Cas13d mutation;
(d) a mutation corresponds to a Cas13d mutation (e.g., that of Example 4) that retains between about 25-75% of guide RNA-specific cleavage of wild-type Cas13d (such as SEQ ID NO: 101), and exhibits less than about 27.5% collateral effect of wild-type Cas13d (such as SEQ ID NO: 101);
(e) a mutation corresponds to the N2V4, N2V5, N4V3, N6V3, N10V6, N15V2, N20V6, or N20-Y910A mutation of Cas13d mutation;
(f) a mutation corresponds to a Cas13e mutation (e.g., that of Example 1, 2, or 5) that retains at least about 75% of guide RNA-specific cleavage of wild-type Cas13e (such as SEQ ID NO: 4), and exhibits less than about 25% collateral effect of wild-type Cas13e (such as SEQ ID NO: 4);
(g) a mutation corresponds to the M1V4, M2V2, M2V3, M2V4, M5V1, M6V2, M6V3, M6V4, M7V1, M7V2, M7V3, M7-Y55A, M7-Y61A, M11V1, M12V3, M15V1, M15V2, M15-Y643A, M15-Y647A, M16V1, M16V2, M17V2, M18V2, M18V3, M19V2, M19V3, or M19-IA mutation of Cas13e mutation;
(h) a mutation corresponds to a Cas13e mutation (e.g., that of Example 5) that retains between about 25-75% of guide RNA-specific cleavage of wild-type Cas13e (such as SEQ ID NO: 4), and exhibits less than about 25% collateral effect of wild-type Cas13e (such as SEQ ID NO: 4);
(i) a mutation corresponds to the M17YY (cfCas13e), M8V4, M9V1, M11V2, M11V3, M13V1, M13V2, M13V3, M15V3, or M20V2 mutation of Cas13e mutation;
(j) a mutation corresponds to a Cas13f mutation (e.g., that of Example 12) that retains at least about 75% of guide RNA-specific cleavage of wild-type Cas13f (such as SEQ ID NO: 52), and exhibits less than about 25 or 27.5% collateral effect of wild-type Cas13f (such as SEQ ID NO: 52);
(k) a mutation corresponds to the F7V2, F10V1, F10V4, F40V2, F40V4, F44V2, F10S19, F10S21, F10S24, F10S26, F10S27, F10S33, F10S34, F10S35, F10S36, F10S45, F10S46, F10S48, F10S49, F40S22, F40S23, F40S26, F40S27, or F40S36 mutation of Cas13f mutation;
(l) a mutation corresponds to a Cas13f mutation (e.g., that of Example 12) that retains between about 50-75% of guide RNA-specific cleavage of wild-type Cas13f (such as SEQ ID NO: 52), and exhibits less than about 25 or 27.5% collateral effect of wild-type Cas13f (such as SEQ ID NO: 52); and/or
(m) a mutation corresponds to the F2V4, F3V1, F3V3, F3V4, F5V2, F5V3, F6V4, F7V1, F38V4, F40V1, F41V1, F41V3, F42V4, F43V1, F10S2, F10S11, F10S12, F10S18, F10S20, F10S23, F10S25, F10S28, F10S43, F10S44, F10S47, F10S50, F10S51, F10S52, F40S7, F40S9, F40S11, F40S21, F40S22, F40S24, F40S28, F40S29, F40S30, F40S35, or F40S37 or mutation of Cas13f mutation.

31. The engineered Cas13 of any one of claims 1-30, wherein the engineered Cas13 preserves at least about 50%, 60%, 70%, 72.5%, 75%, 80%, 85%, 87.5%, 90%, 95%, 96%, 97%, 97.5%, 98%, 99% or more of the guide sequence-specific endonuclease cleavage activity of the wild-type Cas13 towards the target RNA.

32. The engineered Cas13 of any one of claims 1-31, wherein the engineered Cas13 lacks at least about 70%, 72.5%, 75%, 77.5%, 80%, 82.5%, 85%, 87.5%, 90%, 92.5%, 95%, 96%, 97%, 98%, 99%, or 100% of the guide sequence-independent collateral endonuclease cleavage activity of the wild-type Cas13 towards the non-target RNA.

33. The engineered Cas13 of any one of claims 1-32, wherein the engineered Cas13 preserves at least about 80-90% of the guide sequence-specific endonuclease cleavage activity of the wild-type Cas13 towards the target RNA, and lacks at least about 95-100% of the guide sequence-independent collateral endonuclease cleavage activity of the wild-type Cas13 towards the non-target RNA.

34. The engineered Cas13 of any one of claims 1-33, having an amino acid sequence at least 80%, 85%, 90%, 95%, 96%, 97%, 98%, 99%, 99.1%, 99.2%, 99.3%, 99.4%, 99.5%, 99.6%, 99.7%, 99.8%, or 99.86% identical to any one of SEQ ID NOs: 6-10 and Cas13d (e.g., SEQ ID NO: 101), excluding any one or more of the regions defined by SEQ ID NOs: 16, 20, 24, 28, and 32, and any of the mutation regions in Example 4 or 5.

35. The engineered Cas13 of claim 34, wherein said amino acid sequence contains up to 1, 2, 3, 4, or 5 differences (a) in each of one or more regions defined by SEQ ID NO: 16, 20, 24, 28, and 32, as compared to SEQ ID NOs: 17, 21, 25, 29, and 33, respectively, or (b) in any of the mutations in claim 30.

36. The engineered Cas13 of any one of claims 1-35, having the amino acid sequence of any one of SEQ ID NOs: 6-10.

37. The engineered Cas13 of any one of claims 1-36, having the amino acid sequence of SEQ ID NO: 9 or 10.

38. The engineered Cas13 of any one of claims 1-37, further comprising a nuclear localization signal (NLS) sequence or a nuclear export signal (NES).

39. The engineered Cas13 of claim 38, comprising an N- and/or a C-terminal NLS.

40. A polynucleotide encoding the engineered Cas13 of any one of claims 1-39.

41. The polynucleotide of claim 40, which is codon-optimized for expression in a eukaryote, a mammal, such as a human or a non-human mammal, a plant, an insect, a bird, a reptile, a rodent (e.g., mouse, rat), a fish, a worm/nematode, or a yeast.

42. A polynucleotide having (i) one or more (e.g., 1, 2, 3, 4, 5, 6, 7, 8, 9 or 10) nucleotides additions, deletions, or substitutions compared to the polynucleotide of claim 40 or 41; (ii) at least 50%, 60%, 70%, 80%, 90%, 95%, or 97% sequence identity to e polynucleotide of claim 40 or 41; (iii) hybridize under stringent conditions with the polynucleotide of claim 40 or 41 or any of (i) and (ii); or (iv) is a complement of any of (i)-(iii).

43. A vector comprising the polynucleotide of any one of claims 40-42.

44. The vector of claim 43, wherein the polynucleotide is operably linked to a promoter and optionally an enhancer.

45. The vector of claim 44, wherein the promoter is a constitutive promoter, an inducible promoter, a ubiquitous promoter, or a tissue specific promoter.

46. The vector of any one of claims 43-45, which is a plasmid.

47. The vector of any one of claims 43-45, which is a retroviral vector, a phage vector, an adenoviral vector, a herpes simplex viral (HSV) vector, an AAV vector, or a lentiviral vector.

48. The vector of claim 47, wherein the AAV vector is a recombinant AAV vector of the serotype AAV1, AAV2, AAV4, AAV5, AAV6, AAV7, AAVrh74, AAV8, AAV9, AAV10, AAV 11, AAV 12, or AAV 13.

49. A delivery system comprising (1) a delivery vehicle, and (2) the engineered Cas13 of any one of claims 1-39, the polynucleotide of any one of claims 40-42, or the vector of any one of claims 43-48.

50. The delivery system of claim 49, wherein the delivery vehicle is a nanoparticle, a liposome, an exosome, a microvesicle, or a gene-gun.

51. A cell or a progeny thereof, comprising the engineered Cas13 of any one of claims 1-39, the polynucleotide of any one of claims 40-42, or the vector of any one of claims 43-48.

52. The cell or progeny thereof of claim 51, which is a eukaryotic cell (e.g., a non-human mammalian cell, a human cell, or a plant cell) or a prokaryotic cell (e.g., a bacteria cell).

53. A non-human multicellular eukaryote comprising the cell of claim 51 or 52.

54. The non-human multicellular eukaryote of claim 53, which is an animal (e.g., rodent or primate) model for a human genetic disorder.

55. A method of modifying a target RNA, the method comprising contacting the target RNA with a CRISPR-Cas13 complex comprising the engineered Cas13 of any one of claims 1-39, and a spacer sequence complementary to at least 15 nucleotides of the target RNA; wherein upon binding of the complex to the target RNA through the spacer sequence, engineered Cas13 modifies the target RNA.

56. The method of claim 55, wherein the target RNA is modified by cleavage by the engineered Cas13.

57. The method of claim 55 or 56, wherein the target RNA is an mRNA, a tRNA, an rRNA, a non-coding RNA, an lncRNA, or a nuclear RNA.

58. The method of any one of claims 55-57, wherein upon binding of the complex to the target RNA, the engineered Cas13 does not exhibit substantial (or detectable) collateral RNase activity.

59. The method of any one of claims 55-58, wherein the target RNA is within a cell.

60. The method of claim 59, wherein the cell is a cancer cell.

61. The method of claim 59, wherein the cell is infected with an infectious agent.

62. The method of claim 61, wherein the infectious agent is a virus, a prion, a protozoan, a fungus, or a parasite.

63. The method of claim 59, wherein the cell is a neuronal cell (e.g., astrocyte, glial cell (e.g., Muller glia cell, oligodendrocyte, ependymal cell, Schwan cell, NG2 cell, or satellite cell)).

64. The method of any one of claims 59-63, wherein the CRISPR-Cas13 complex is encoded by a first polynucleotide encoding the engineered Cas13 of any one of claims 1-39, and a second polynucleotide comprising or encoding a spacer RNA capable of binding to the target RNA, wherein the first and the second polynucleotides are introduced into the cell.

65. The method of claim 64, wherein the first and the second polynucleotides are introduced into the cell by the same vector.

66. The method of any one of claims 59-65, which causes one or more of: (i) in vitro or in vivo induction of cellular senescence; (ii) in vitro or in vivo cell cycle arrest; (iii) in vitro or in vivo cell growth inhibition and/or cell growth inhibition; (iv) in vitro or in vitro induction of anergy; (v) in vitro or in vitro induction of apoptosis; and (vi) in vitro or in vitro induction of necrosis.

67. A method of treating a condition or disease in a subject in need thereof, the method comprising administering to the subject a composition comprising a CRISPR-Cas complex comprising the engineered Cas13 of any one of claims 1-39 or a polynucleotide encoding the same; and a spacer sequence complementary to at least 15 nucleotides of a target RNA associated with the condition or disease; wherein upon binding of the complex to the target RNA through the spacer sequence, the engineered Cas13 cleaves the target RNA, thereby treating the condition or disease in the subject.

68. The method of claim 67, wherein the condition or disease is a neurological condition, a cancer or an infectious disease.

69. The method of claim 68, wherein the cancer is Wilms' tumor, Ewing sarcoma, a neuroendocrine tumor, a glioblastoma, a neuroblastoma, a melanoma, skin cancer, breast cancer, colon cancer, rectal cancer, prostate cancer, liver cancer, renal cancer, pancreatic cancer, lung cancer, biliary cancer, cervical cancer, endometrial cancer, esophageal cancer, gastric cancer, head and neck cancer, medullary thyroid carcinoma, ovarian cancer, glioma, lymphoma, leukemia, myeloma, acute lymphoblastic leukemia, acute myelogenous leukemia, chronic lymphocytic leukemia, chronic myelogenous leukemia, Hodgkin's lymphoma, non-Hodgkin's lymphoma, or urinary bladder cancer.

70. The method of claim 68, wherein the neurological condition is glaucoma, age-related RGC loss, optic nerve injury, retinal ischemia, Leber's hereditary optic neuropathy, a neurological condition associated with degeneration of RGC neurons, a neurological condition associated with degeneration of functional neurons in the striatum of a subject in need thereof, Parkinson's disease, Alzheimer's disease, Huntington's disease, Schizophrenia, depression, drug addiction, movement disorder such as chorea, choreoathetosis, and dyskinesias, bipolar disorder, Autism spectrum disorder (ASD), or dysfunction.

71. The method of any one of claims 67-70, which is an in vitro method, an in vivo method, or an ex vivo method.

72. A CRISPR-Cas complex comprising the engineered Cas13 of any one of claims 1-39, a guide RNA comprising a DR sequence that binds the engineered Cas13 and a spacer sequence designed to be complementary to and binds a target RNA.

73. The CRISPR-Cas complex of claim 72, wherein the target RNA is encoded by a eukaryotic DNA.

74. The CRISPR-Cas complex of claim 73, wherein the eukaryotic DNA is a non-human mammalian DNA, a non-human primate DNA, a human DNA, a plant DNA, an insect DNA, a bird DNA, a reptile DNA, a rodent DNA, a fish DNA, a worm/nematode DNA, a yeast DNA.

75. The CRISPR-Cas complex of any one of claims 72-74, wherein the target RNA is an mRNA.

76. The CRISPR-Cas complex of any one of claims 72-75, further comprising a target RNA comprising a sequence capable of hybridizing to the spacer sequence.

77. A method of identifying an engineered CRISPR/Cas effector enzyme of a corresponding wild-type Cas effector enzyme, wherein the engineered Cas substantially maintains guide-sequence-specific endonuclease activity and substantially lacks guide-sequence-independent collateral endonuclease activity, the method comprising:
(1) in each of one or more regions of 15-20 consecutive polynucleotides (a) within 80, 90, 100, 110, 120, 130, 140, 150, 160, 170, or 180 residues of any residues of a endonuclease catalytic domain of the wild-type Cas effector enzyme or (b) spatially within 1-10 Ångström of any residues of the endonuclease catalytic domain of the wild-type Cas effector enzyme, substituting one or more (e.g., substantially all, except for up to 1, 2, 3, 4, or 5) polar and charged residues with a charge neutral aliphatic side-chain residue (such as A); and,
(2) identifying engineered Cas substantially maintains guide-sequence-specific endonuclease activity and substantially lacks guide-sequence-independent collateral endonuclease activity compared to the corresponding wild-type Cas.

78. The method of claim 77, wherein the wild-type Cas effector enzyme is a Cas13.

79. The method of claim 78, wherein the Cas13 is a Cas13a, a Cas13b, a Cas13c, a Cas13d (e.g., CasRx), a Cas13e, or a Cas13f.

80. The method of claim 79, wherein the Cas13e has the amino acid sequence of SEQ ID NO: 4; or wherein the Cas13d has the amino acid sequence of SEQ ID NO: 101; or wherein the Cas13f has the amino acid sequence of SEQ ID NO: 52.

81. A method of identifying an engineered Clustered Regularly Interspaced Short Palindromic Repeat (CRISPR)-Cas13 effector enzyme with altered guide sequence-independent collateral nuclease activity, the method comprising: in a region spatially close to an endonuclease catalytic domain of the corresponding wild-type Cas13 effector enzyme, substituting one or more charged or polar residues to a charge-neutral short chain aliphatic residue (such as A), to determine whether the resulting variant Cas13 effector enzyme:
(1) has substantially preserved guide sequence-specific endonuclease cleavage activity of the wild-type Cas13 towards a target RNA complementary to the guide sequence; and,
(2) either substantially lacks or has enhanced guide sequence-independent collateral endonuclease cleavage activity of the wild-type Cas13 towards a non-target RNA that does not bind to the guide sequence,
thereby identifying said engineered Cas13 effector enzyme with altered guide sequence-independent collateral nuclease activity.

82. The method of claim 81, wherein the engineered Cas13 effector enzyme substantially lacks guide sequence-independent collateral nuclease activity.

83. The method of claim 81, wherein the engineered Cas13 effector enzyme has enhanced guide sequence-independent collateral nuclease activity.

84. The method of any one of claims 81-83, wherein said one or more charged or polar residues are within a stretch of 15-20 (e.g., 16 or 17) consecutive amino acids within the region.

85. The method of claim 84, wherein said one or more charged or polar residues comprise, consist essentially of, or consist of one or more (or all) Tyr (Y) residue(s) within the stretch.
